(19) United States
(12) Patent Application Publication
(10) Pub. No.: US 2008/0260820 A1
(43) Pub. Date: Oct. 23, 2008

(54) Oral dosage formulations of protease-resistant polypeptides

(76) Inventors: Gilles Borrelly, Combs-la-Ville (FR); Caroline Chauchard, Viry-Chatillon (FR); Lila Drittanti, Vigneux-sur-Seine (FR); Manuel Vega, Vigneux-sur-Seine (FR)

Correspondence Address: Bell, Boyd & Lloyd LLP, 3580 Carmel Mountain Road, Suite 200, San Diego, CA, 92130, US

(21) Appl. No.: 11/788,836

(22) Filed: Apr. 19, 2007

(51) Int. Cl. A61K 38/21; A61K 31/7088; A61K 38/18; A61K 38/22; A61K 38/28; A61K 9/28; A61P 19/02; A61P 3/04; A61P 31/18; A61P 7/04; A61P 41/00; A61P 37/06; A61P 35/02; A61P 35/00; A61P 31/12; A61P 21/00; A61K 9/48; A61K 39/395; A61K 38/27; A61K 38/19; A61K 38/20

(52) U.S. Cl. 424/463; 369/44.11; 424/130.1; 424/474; 424/85.1; 424/85.2; 424/85.5; 424/85.6; 424/85.7; 424/94.6; 424/94.63; 514/12; 514/3; 514/44

(57) ABSTRACT

Oral dosage formulations of the protease-resistant therapeutic polypeptides are provided. The dosage formulations for administration per dosage per day or per week are higher than the subcutaneous dosage. Included among the oral dosage formulations are tablets and capsules, including enteric-coated forms. Methods for treatment or prevention of diseases or conditions that are treatable or preventable by the administration of such oral dosage formulations of protease-resistant polypeptides are provided.

### RELATED APPLICATIONS

[0001] This application is related to Korean application (Attorney Docket No. 17109-022KR1/932KR), Gilles Borrelly, Caroline Chauchard, Lila Drittanti and Manuel Vega, entitled “ORAL DOSAGE FORMULATIONS OF PROTEASE-RESISTANT POLYPEPTIDES,” filed on Apr. 19, 2007. This application also is related to U.S. application Ser. No. 11/176,830, to Rene Gantier, Thierry Guyon, Manuel Vega and Lila Drittanti, entitled “RATIONAL EVOLUTION OF CYTOKINES FOR HIGHER STABILITY, THE CYTOKINES AND ENCODING NUCLEIC ACID MOLECULES,” filed Jul. 6, 2005, and published as U.S. Application No. US 2006-0020116, which is a continuation of U.S. application Ser. No. 10/658,834, to Rene Gantier, Thierry Guyon, Manuel Vega and Lila Drittanti entitled “RATIONAL EVOLUTION OF CYTOKINES FOR HIGHER STABILITY, THE (sold as CYTOKINES AND ENCODING NUCLEIC ACID MOLECULES,” filed Sep. 8, 2003, and published as U.S. Application No. US-2004-0132977-A1. This application also is related to U.S. application Ser. No. 11/196,067, to Rene Gantier, Thierry Guyon, Cruz Ramos Hugo, Manuel Vega and Lila Drittanti entitled “RATIONAL DIRECTED PROTEIN EVOLUTION USING TWO-DIMENSIONAL RATIONAL MUTAGENESIS SCANNING,” filed Aug. 2, 2005, and published as U.S. Application No. US-2006-0020396-A1, which is a continuation of U.S. application Ser. No. 10/658,355, to Rene Gantier, Thierry Guyon, Cruz Ramos Hugo, Manuel Vega and Lila Drittanti, entitled “RATIONAL DIRECTED PROTEIN EVOLUTION USING TWO-DIMENSIONAL RATIONAL MUTAGENESIS SCANNING”, filed Sep. 8, 2003 and published as U.S. Application No. US 2005-0202438.

[0002] This application also is related to U.S. application Ser. No. 10/658,834, filed Sep. 8, 2003, and to published International PCT Application WO 2004/022593, to Rene Gantier, Thierry Guyon, Manuel Vega and Lila Drittanti entitled, “RATIONAL EVOLUTION OF CYTOKINES FOR HIGHER STABILITY, THE CYTOKINES AND ENCODING NUCLEIC ACID MOLECULES.” This application also is related to U.S. application Ser. No. 10/658,355, filed Sep. 8, 2003, and to International PCT Application WO 2004/022747, to Rene Gantier, Thierry Guyon, Cruz Ramos Hugo, Manuel Vega and Lila Drittanti entitled “RATIONAL DIRECTED PROTEIN EVOLUTION USING TWO-DIMENSIONAL RATIONAL MUTAGENESIS SCANNING.”

[0003] The subject matter of each of the above-referenced applications is incorporated by reference in its entirety.

### INCORPORATION BY REFERENCE OF SEQUENCE LISTING PROVIDED ON COMPACT DISCS

[0004] An electronic version on compact disc (CD-R) of the Sequence Listing is filed herewith in duplicate (labeled Copy # 1 and Copy # 2), the contents of which are incorporated by reference in their entirety. The computer-readable file on each of the aforementioned compact discs, created on Apr. 17, 2007, is identical, 3,214 kilobytes in size, and titled 932SEQ.001.txt.

### FIELD OF INVENTION

[0005] Oral dosage formulations of protease-resistant polypeptides are provided. Methods for treatment or prevention of diseases or conditions that are treatable or preventable by the administration of the protease-resistant polypeptides are provided.

### BACKGROUND

[0006] Therapeutic polypeptides have been approved for treatment of a variety of diseases and conditions including, but not limited to, proliferative diseases, such as cancer, inflammatory disease, autoimmune diseases, viral infection, bacterial infection, blood disorders, cardiovascular diseases, respiratory diseases, neural disorders, gastrointestinal disorders, and metabolic diseases, such as obesity. While oral administration is desirable, therapeutic proteins typically are administered via injection or other route that avoids the digestive tract.

[0007] Upon oral administration, these proteins are continuously digested by luminal proteases of the gastrointestinal tract resulting in little or no absorption of the therapeutic protein into the blood. Gastrointestinal degradation or other proteolytic degradation of therapeutic proteins prevents their per-oral administration. Thus, oral delivery of therapeutic proteins for clinical use is a challenge for pharmaceutical science to solve. It is desirable to have oral dosage formulations of such therapeutic polypeptides. Hence, among the objects herein, it is an object to provide oral formulations of therapeutic polypeptides.

### SUMMARY

[0008] Provided are oral dosage formulations, such as tablets and capsules, of therapeutic polypeptides. The therapeutic polypeptides are modified in their primary sequences, typically by one or two amino acid changes, to render them more resistant to proteases than absent such modification. The formulations contain an amount of the modified therapeutic polypeptide so that upon oral administration a therapeutically effective amount of the polypeptide is delivered to the bloodstream. The dosage formulations can include one or dosage unit, each of which contains the entire dosage amount or a fraction thereof. The dosage formulations generally contain an amount of therapeutic polypeptide that is higher, about or 6-200, such as about or 10-100, including, for example, 15-50, 20-30, 10-35, 10-45, typically about or 15-40 times higher (depending upon the therapeutic protein and indication treated and the formulation) for administration per day, than amounts that are administered subcutaneously for the same indication using the same therapeutic protein that does not have the modified amino acid changes that render it protease resistant. Hence if, for example, 1 mg/day is administered to a 70 kg male subcutaneously, 6 mg to 200 mg or more is administered via oral dosage formulation. The particular dosage depends upon the therapeutic polypeptide and the oral dosage formulation, and, if needed, can be empirically determined. Dosage regimens, such as number of administrations per week can vary depending upon the therapeutic protein and the indication. For oral administration, the total dosage per week for example, is greater, 10-200 times or more, than the subcutaneous weekly dosage of the same therapeutic protein that is not modified for protease resistance.

[0009] In particular, provided are dosage formulations for protease-resistant therapeutic polypeptide that contain an amount of a therapeutic protein sufficient, upon oral administration to a subject, to reach therapeutically effective levels in the bloodstream in the subject. The therapeutic protein is modified in its primary sequence of amino acids, whereby it is more protease resistant than in the absence of the modifications, and the protein can reach therapeutically effective levels in the bloodstream upon oral administration; and the amount is about or is 10-100, typically 10-50, 15-45, 15-40 times the subcutaneous dose for the same indication and for the same therapeutic protein that is not modified to be protease resistant. The dosage refers to that which is administered in a day. A greater differential, such as 10-1000, 10-600 times greater for an oral dosage compared to a subcutaneous dosage when comparing on a weekly basis. The oral dosage, however, are more convenient to administer and have greater patient compliance. Also, as shown herein, the pharmacokinetics of the oral dosages administration can be better controlled and more uniform.

[0010] The unit dosages in the oral dosage formulations of protease-resistant therapeutic polypeptides can be formulated with one or more pharmaceutically acceptable excipients. The oral dosage formulations of protease-resistant therapeutic polypeptides can contain dosage units that are coated to effect delivery of the polypeptide to the gastrointestinal tract or parts thereof. For example, oral dosage formulations or dosage unites that contain one or more dosage units that is/are enterically coated are provided.

[0011] The protease-resistant therapeutic polypeptides in the unit dosage or dosages in the oral dosage formulations of can be further modified in activity of structure, such as to include glycosylation, carboxylation, hydroxylation, hasylation, carbamylation, sulfation, phosphorylation and/or PEGylation. Included are protease-resistant therapeutic polypeptides that are hyperglycosylated. Other activities and properties of the polypeptides can be modified as well.

[0012] The protease-resistant therapeutic polypeptide can contain additional modifications. Such modifications include amino acid modifications that contribute to increased activity, altered immunogenicity, stability, thermal tolerance, protease-resistance, glycosylation, carboxylation, hydroxylation, hasylation, carbamylation, sulfation, phosphorylation, or PEGylation. Such amino acid modifications can be natural amino acids, non-natural amino acids and/or a combination of natural and non-natural amino acids.

[0013] Among the therapeutic proteins that are modified are protease-resistant variants of coagulation factors, cytokines, growth factors, hormones, hydrolases, immunoglobulins, inhibitor proteins, nuclear proteins and proteases, such as, but are not limited to,

interleukin-10, an interferon-β; an interferon alpha, interferon gamma, granulocyte colony stimulating, leukemia inhibitory factor, a growth hormone, ciliary neurotrophic factor, leptin, insulin, oncostatin M, relaxin, interleukin-6, interleukin-12, erythropoietin, granulocyte-macrophage colony stimulating factor, interleukin-2, interleukin-3, interleukin-4, interleukin-5, interleukin-13, receptor ligands, such as Flt3 ligand, monoclonal antibody, antibody fragments, cameloids, and stem cell factors. The modifications that increase protease resistance can be the only modifications in the sequence of amino acids compared to a wild-type protein. The protease-resistant therapeutic polypeptides can include additional modifications that alter properties other than protease resistance in the sequence of amino acids compared to a wild-type protein. Additional modifications include those that, upon expression in a suitable expression system, add one or more glycosylation sites to produce hyperglycosylation proteins. Modification with respect to protease resistance is compared to the absence of the modifications that result in protease resistance

[0014] Exemplary of the unmodified therapeutic proteins that can be modified to exhibit increased protease resistance are any set forth in the Sequence Listing, such as, but are not limited to, interleukin-10 (IL-10; SEQ ID NO: 809), interferon beta (IFN-0; SEQ ID NO: 147), interferon alpha-2a (IFNα-2a; SEQ ID NO: 2162), interferon alpha-2b (IFNα-2b; SEQ ID NO: 2067), interferon gamma (IFN-γ; SEQ ID NO: 661), granulocyte colony stimulating factor (G-CSF; SEQ ID NO: 47), leukemia inhibitory factor (LIF; SEQ ID NO: 1148), growth hormone (GH; SEQ ID NO: 1260), ciliary neurotrophic factor (CNTF; SEQ ID NO: 1), leptin (SEQ ID NO: 1126), oncostatin M (SEQ ID NO: 1181), interleukin-6 (IL-6; SEQ ID NO: 1080), interleukin-12 (IL-12; SEQ ID NO: 860); erythropoietin (EPO; SEQ ID NO: 1886), granulocyte-macrophage colony stimulating factor (GM-CSF; SEQ ID NO: 85), interleukin-2 (IL-2; SEQ ID NO: 946), interleukin-3 (IL-3; SEQ ID NO: 995), interleukin-4 (IL-4; SEQ ID NO: 1018), interleukin-5 (IL-5; SEQ ID NO: 1044), interleukin-13 (IL-13; SEQ ID NO: 917), Flt3 ligand (SEQ ID NO: 118) and stem cell factor (SCF; SEQ ID NO: 1215). Particular protease-resistant therapeutic polypeptides include interferon-α2a and -α2b, and human growth hormone. Modified protease-resistant therapeutic polypeptides include polypeptides whose sequences are set forth in any of SEQ ID NOS: 2-46, 48-84, 86-117, 119-146, 148-660, 662-808, 810-859, 861-916, 918-945, 947-994, 996-1017-, 1019-1043, 1045-1079, 1081-1125, 1127-1147, 1149-1180, 1182-1214, 1216-1259, 1261-1885, 1887-1981, 1983-2066, and 2176-2182.

[0015] Provided herein are oral dosage formulations of protease-resistant IFN-α polypeptides. Protease-resistant IFN-α polypeptides can be any IFN-α polypeptide that is modified in its primary sequence, typically by one or two amino acid changes, to render the polypeptide more resistant to proteases than absent such modification. Provided herein are oral dosage formulations of a protease-resistant IFN-α polypeptide, where the modification is replacement of a glutamic acid residue (E) with a glutamine residue (Q) at position 41 of a mature IFN-α polypeptide set forth in SEQ ID NO: 2067 or at corresponding position in an allelic or species variant thereof and other variants modified in other loci.

[0016] Provided herein are oral dosage formulations of protease-resistant IFN-α polypeptides formulated with one or more pharmaceutically acceptable excipients. The oral dosage formulations of protease-resistant IFN-α polypeptides can be coated or non-coated to effect delivery of the polypeptide to gastrointestinal tract or parts thereof.

[0017] Provided herein are oral dosage formulations of protease-resistant IFN-α polypeptides that are coated with an enteric coating to effect delivery of the polypeptide to lower gastrointestinal tract.

[0018] Provided herein are oral dosage formulations of protease-resistant growth hormone polypeptides. Protease-resistant growth hormone polypeptides can be any growth hormone polypeptide that is modified in its primary sequence, typically by one or two amino acid changes, to render the polypeptide more resistant to proteases than absent such modification. Provided herein are oral dosage formulations of a protease-resistant growth hormone polypeptide, where the modification is replacement of a tyrosine residue (Y) with a isoleucine residue (I) at position 42 of a mature growth hormone polypeptide set forth in SEQ ID NO: 1260 or at corresponding position in an allelic or species variant thereof. Provided herein are oral dosage formulations of a protease-resistant growth hormone polypeptide, where the modification is replacement of a tyrosine residue (Y) with a histidine residue (H) at position 42 of a mature growth hormone polypeptide set forth in SEQ ID NO: 1260 or at corresponding position in an allelic or species variant thereof.

[0019] Provided herein are oral dosage formulations of protease-resistant growth hormone polypeptides formulated with one or more pharmaceutically acceptable excipients. The oral dosage formulations of protease-resistant growth hormone polypeptides can be coated, such as enterically coated to effect delivery of the polypeptide to gastrointestinal tract or parts thereof.

[0020] Also provided are tablets and capsules that contain a protease-resistant therapeutic polypeptide. The tablets and capsules are dosage units. Dosage formulations containing one or more, such as 2, 3, 4, 5, 6, 7, 8, 9, 10 or more of the tablets and capsules are provided.

[0021] Also provided are tablets and capsules that contain about or 10-100 μg, such as 3, 5 or 10 μg-50 μg, 3, 5 or 10 μg-30 μg, 3, 5 or 10 μg-40 μg, 3, 5 or 10 μg-45 μg, such as 10-50 μg of an interferon-α (IFN-α). Exemplary tablets or capsules contain 20, 30, 40 or 50 μg of the INF-α, such as IFN-α2a or -α2b. The IFN-α2 is protease resistant by virtue of modifications in its primary sequence of amino acids. The IFN-α can be IFN-α2a or IFN-α2b. The tablet or capsule can include further therapeutic or active agents, such as a second therapeutic agent for the same indication as the interferon. Exemplary second therapeutic agents include, but are not limited to, nucleoside analog, such as ribavirin, an L-nucleoside, a type II interferon receptor antagonist, a tumor necrosis factor (TNF) antagonist, thymosin-α, a SAPK inhibitor, amantidine, an NS3 inhibitor, an NS5B inhibitor and an alpha-glucosidase inhibitor. The IFN-α, such the IFN-α2b, can further include additional modifications, whereby it is hyperglycosylated upon expression. The amount is corrected to reflect the additional mass due to hyperglycosylation or other modification. The tablet or capsule of can be enterically coated. Exemplary of the modified IFN-α2b is the IFN-2a, such as IFN-α2b that contains a modification that is or corresponds to E41Q of SEQ ID NO: 2067, such as the polypeptide whose sequence set forth in SEQ ID NO: 1995 or allelic and species variants thereof.

[0022] Also provided are tablets and capsules that contain protease-resistant therapeutic polypeptides, such as human growth hormone. The tablet or capsule containing the modified hGH can contain, for example, 1-, 3- or 5-50 mg, 10-50 mg, 10-40 mg, 15-35 mg, 1-40 mg, 1-45 mg, 5-30 mg, 10-20 mg or 3-30 mg of human growth hormone, wherein the human growth hormone is protease resistant. The tablet or capsule can contain additional therapeutic or active agents, such as second therapeutic agent for the same indication as the growth hormone, such as, for example a gonadotropin releasing hormone (GNRH) analog, insulin-like growth factor 1, (rhIGF-1), a growth hormone-releasing peptide (GRP), a free fatty acid regulation agent, leutenizing hormone releasing hormone, and an anabolic steroid. Exemplary tablets or capsules contain 3 mg, 12 mg, 24 mg or 30 mg of the protease-resistant growth hormone polypeptide. The tablets and capsules can be formulated to be enterically coated.

[0023] The human growth hormone can contain additional modifications that alter other functional properties and/or activities, such as addition of glycosylation sites, such that upon expression in a suitable system, the polypeptide is hyperglycosylated. Exemplary of protease-resistant therapeutic polypeptides is a human growth hormone contains a modification that is or corresponds to Y42I of SEQ ID NO: 1260 and/or allelic or species variants thereof, such as a human growth hormone whose sequence of amino acids is set forth in SEQ ID NO: 1318.

[0024] Provided herein are dosage units, such as tablets and capsules, and oral dosage formulations containing one or more dosage units of protease-resistant growth hormone polypeptides or IFN-α polypeptide. The dosage units can be coated with or formulated form an enteric coating so that the tablet or capsule has increased resistance to digestion or degradation in the digestive tract. For example, provided are tablets and capsules that contain about or 1-100 gm, 1-50 mg, 10-50 mg, 10-40 mg, 15-35 mg, 1-40 mg, 1-45 mg, 5-30 mg, 10-20 mg or 3-30 mg of human growth hormone. The human growth hormone is protease resistant by virtue of modifications of the primary sequence of amino acids. The tablets and capsules optionally are enterically coated.

[0025] Provided are tablets and capsules that contain about or 10, 20, 30, 40, 50, 60, 70, 75, 80, 90 100, 125 μg or more of IFN-α. IFN-α polypeptide is protease resistant by virtue of modifications of the primary sequence of amino acids. The tablets and capsules optionally are enterically coated.

[0026] Use of the dosage formulations and dosage unites and/or the tablets and capsules for treatment of a disease or condition are provided. Also provided are uses of a modified therapeutic protein for treatment of a disease, where the therapeutic protein is modified in its primary sequence of amino acids, whereby it is more protease resistant than in the absence of the modifications, and the protein can reach therapeutically effective levels in the bloodstream upon oral administration; and the amount of therapeutic protein in the formulation 15-40 times the subcutaneous dose for the same indication and for the same therapeutic protein that is not modified to be protease resistant.

[0027] Uses of a modified therapeutic protein for formulation of a medicament for treatment of a disease are provided. The protease-resistant therapeutic polypeptide is modified in its primary sequence of amino acids, whereby it is more protease resistant than in the absence of the modifications; the polypeptide can reach therapeutically effective levels in the bloodstream upon oral administration; and the amount of therapeutic protein in the formulation 15-40 times the subcutaneous dose for the same indication and for the same therapeutic protein that is not modified to be protease resistant. Any modified protease-resistant therapeutic polypeptide can be employed, including, for example, treatment of a disease or condition for which treatment by administration of IFN-α or growth hormone is indicated, where the protein is an IFN-α for treatment where IFN-α is indicated; and the protein is growth hormone for treatment where growth hormone is indicated.

[0028] Also provided are methods of treatment of a disease or condition by administering a dosage formulation or tablet or capsule provided herein. The dosage formulation can contain one or a plurality of dosage units and all are administered in a single day. Any suitable regimen can be followed, such as one in which a dosage formulation is administered one, two, three, four, five, six or seven times or more a week, or one in which a dosage formulation is administered one, two, three for four times a day, every day, 2, 3, 4, 5, 6 or 7 times a week.

### BRIEF DESCRIPTION OF THE FIGURES

[0029] FIG. 1(A) illustrates the process by which native or wild-type therapeutic polypeptides degraded by gastrointestinal proteases of the intestinal lumen, resulting in little or no absorption of the polypeptide into the blood. The graphs above each figure illustrate the amount of active polypeptide in the blood.

[0030] FIG. 1(B) illustrates the process by which protease-resistant polypeptides are resistant to gastrointestinal proteases of the intestinal lumen, resulting in sustained absorption of the polypeptide into the blood. The graphs above each figure illustrate the amount of active polypeptide in the blood.

[0031] FIG. 2 depicts the effects of native hGH and hGH(Y42I) on body weight following administration of liquid formulations of the proteins either orally (oral) or subcutaneously (SC) in a hypophesectomized rat model of growth hormone deficiency.

### DETAILED DESCRIPTION

[0032] Outline
[0033] A. Definitions
[0034] B. Gastrointestinal Absorption and Detection of Protease-resistant Polypeptides
[0035] C. Oral Dosage Formulations
   [0036] 1. Oral Dosage Units
   [0037] 2. Preparation of the Oral Dosage Formulation and Oral Dosage Units
      [0038] a. Delivery Control
         [0039] i. Enteric coatings
         [0040] ii. Multiple Coatings and Sub-coatings
      [0041] b. Other Delivery Additives and Carriers
[0042] D. Protease-resistant Polypeptides for Oral Dosage Formulations
   [0043] 1. Protease Resistant Polypeptides
   [0044] 2. Cytokines
      [0045] a. Interferon/Interleukin-10 Family
      [0046] b. Long-chain Cytokine Family
      [0047] c. Short-chain Cytokine Family
   [0048] 3. Other Exemplary Polypeptides
      [0049] a. Blood Factors
      [0050] b. Insulin
      [0051] c. Relaxin
      [0052] d. Antibodies
      [0053] e. Growth factors
      [0054] f. Soluble receptors
      [0055] g. Chemokines
      [0056] h. Angiogenic agents
      [0057] i. Neuroactive peptides
      [0058] j. Additional proteins
[0059] E. Oral Dosage Formulations of IFN-α Protease-resistant Polypeptides
   [0060] 1. Protease-resistant IFN-α Polypeptides
      [0061] a. Further Modifications of Protease-resistant IFN-α Polypeptides
   [0062] 2. Expression of Protease-resistant IFN-α Polypeptides
   [0063] 3. Oral formulations and Unit Dosage Forms
[0064] F. Oral Dosage Formulations of Growth Hormone Protease-resistant Polypeptides
   [0065] 1. Protease-resistant Growth Hormone Polypeptides
      [0066] a. Other Modifications of Protease-resistant Growth Hormone Polypeptides
   [0067] 2. Expression of Nucleic Acid Encoding Protease-resistant Growth Hormone Polypeptides
   [0068] 3. Oral formulations and Unit Dosage Forms
[0069] G. Methods Of Treatment And Uses Of The Oral Dosage Formulations
   [0070] 1. Treatment Methods Using IFN-α
      [0071] a. Fibrotic Disorders
         [0072] i. Idiopathic Pulmonary Fibrosis
         [0073] ii. Liver Fibrosis
         [0074] iii. Renal Fibrosis
      [0075] b. Cancer
      [0076] c. Viral Infections
         [0077] i. Hepatitis Virus Infection
   [0078] 2. Treatment Methods Using Growth Hormone
      [0079] a. Growth deficiencies
      [0080] b. Cachexia
      [0081] c. Anti-aging
      [0082] d. Renal osteodystrophy
      [0083] e. Cystic fibrosis
      [0084] f. Other conditions
[0085] H. Combination Therapies
[0086] I. Articles of Manufacture and Kits
[0087] J. Examples

### A. DEFINITIONS

[0088] Unless defined otherwise, all technical and scientific terms used herein have the same meaning as is commonly understood by one of skill in the art to which the invention(s) belong. All patents, patent applications, published applications and publications, GenBank sequences, websites and other published materials referred to throughout the entire disclosure herein, unless noted otherwise, are incorporated by reference in their entirety. In the event that there is a plurality of definitions for terms herein, those in this section prevail. Where reference is made to a URL or other such identifier or address, it understood that such identifiers can change and particular information on the internet can come and go, but equivalent information can be found by searching the internet or other sources. Reference thereto evidences the availability and public dissemination of such information.

[0089] As used herein, dosage regimen refers to the number of oral dosage formulations administered per time period, such as a day or week.

[0090] As used herein, an oral dosage formulation refers a formulation containing one or more oral dosage units of a protease-resistant therapeutic polypeptide formulated for oral delivery, where the oral dosage formulation containing the one or more oral dosage units administered in a single dose provide an amount of the protease-resistant therapeutic polypeptide sufficient to achieve an therapeutically effective amount of the polypeptide in the blood via absorption through the gastrointestinal tract. Accordingly, an oral dosage formulation refers to the amount of the protease-resistant therapeutic polypeptide that is administered per dose and that achieves a therapeutically effective level in the bloodstream.

[0091] As used herein, an “oral dosage unit” contains a full or fractional therapeutically effect amount of a protease resistant polypeptide. Hence, an oral dosage formulation can include one or more oral dosage units. Thus, a pill, tablet, or capsule, containing the protease-resistant polypeptide is exemplary of an oral dosage unit. The pill, tablet or capsule can contain the protease-resistant polypeptide, for example, in the form of a lyophilized powder, granules, particles, gel or solution. It also can include one or more inactive ingredients, such as pharmaceutically-acceptable excipients (e.g., suspending agents, surfactants, disintegrants, binders, diluents, lubricants, stabilizers, antioxidants, osmotic agents, colorants, plasticizers and coatings) that are used to manufacture and deliver active pharmaceutical agents, such as a protease-resistant polypeptide. Such pills, tablets, or capsules can be coated for enteric delivery or non-coated. Capsules can contain enteric-coated beads or enteric-coated granules of the protease-resistant polypeptide.

[0092] As used herein, “therapeutically effective amount administered” or “therapeutically effective dose,” refers to an amount of an agent, compound, material, in a dosage formulation that is at least sufficient to produce a therapeutic effect in a subject. Typically, the amount is high enough to reach a therapeutically effective amount in the blood. The therapeutically effective amount in the blood to be achieved is known for many of the therapeutic polypeptides employed in the methods and dosage formulations effective dosages have been established for the unmodified proteins. For the modified proteins the dosages can be selected to achieve the same effect. The therapeutically effective amount of a protease-resistant polypeptide for use for treatment will vary with the particular condition being treated, the age and physical condition of the patient being treated, the severity of the condition, the duration of the treatment, the nature of concurrent therapy, the particular protease-resistant polypeptide being employed, the particular pharmaceutically-acceptable excipients and/or factors within the knowledge and expertise of the attending physician.

[0093] As used herein, a therapeutically effective amount in the blood is an amount at least sufficient to produce a therapeutic effect in a subject.

[0094] As used herein, a “protease-resistant polypeptide” is a protein that contains one or more modifications in its primary sequence of amino acids compared to a native or wild-type polypeptide and exhibits increased resistance to proteolysis compared to the native or wild-type polypeptide without the one or more amino acid modifications. Hence a protease-resistant polypeptide, such as a protease-resistant therapeutic polypeptide, is a polypeptide that, by virtue of changes in the primary sequence of amino acids, typically only one, two or three changes, can be formulated for oral administration, and upon administration, enter the bloodstream. Generally such polypeptides are resistant to proteases present in the digestive tract, but, because of the relatedness of proteases, can exhibit or be selected to be resistant to proteases in the blood. Such increase can be manifested as a concomitant increase in serum half-life. By increased protease resistance is meant an increase as assessed by in vitro or in vivo assays, including those exemplified herein, and is compared to the polypeptide absent the amino acid sequence changes. Any increase in resistance is contemplated as long as the resulting polypeptide can be administered orally so that it is absorbed into the blood in therapeutically effective amounts.

[0095] Increased resistance to proteases can be assessed by testing for activity following exposure to particular proteases present in the gastrointestinal tract and/or serum. Typically the increase in protease resistance is at least about 1%, 2%, 3%, 4%, 5%, 6%, 7%, 8%, 9%, 10%, 20%, 30%, 40%, 50%, 60%, 70%, 80%, 90%, 91%, 92%, 93%, 94%, 95%, 96%, 97%, 98%, 99%, 100%, 200%, 300%, 400%, 500%, or more compared to the same polypeptide, absent the changes in amino acid sequence that confer the resistance. In other embodiments, the resistance to proteases of the variant polypeptides for use in oral dosage formulations provided herein is increased by an amount of at least, 2 time, 3 times, 4 times, 5 times, 6 times, 7 times, 8 times, 9 times, 10 times, 20 times, 30 times, 40 times, 50 times, 60 times, 70 times, 80 times, 90 times, 100 times, 200 times, 300 times, 400 times, 500 times, 600 times, 700 times, 800 times, 900 times, 1000 times, or more, compared to the same polypeptide, absent the changes in amino acid sequence that confer the resistance.

[0096] As used herein, “resistance to proteolysis” refers to any amount of decreased cleavage of polypeptide by a proteolytic agent, such as a protease. This can be achieved by modifying particular amino acid residues in a polypeptide that are susceptible to cleavage by a particular protease to render the polypeptide less susceptible to cleavage compared to cleavage of the polypeptide without the modification, by the same protease under the same conditions. A modified polypeptide that exhibits increased resistance to proteolysis exhibits, for example, 1%, 2%, 3%, 4%, 5%, 6%, 7%, 8%, 9%, 10%, 20%, 30%, 40%, 50%, 60%, 70%, 80%, 90%, 91%, 92%, 93%, 94%, 95%, 96%, 97%, 98%, 99%, 100%, 200%, 300%, 400%, 500%, or more resistance to proteolysis compared to the same polypeptide, absent the amino acid modification(s).

[0097] As used herein, native or wild-type therapeutic protein refers to a protein that has not been modified to be protease resistant. Such proteins do not reach therapeutically effective levels for any indication when administered orally.

[0098] As used herein, “proteases,” “proteinases” or “peptidases” are interchangeably used to refer to enzymes that catalyze the hydrolysis of covalent peptidic bonds. Proteases include, for example, serine proteases and matrix metalloproteinases. Serine proteases or serine endopeptidases constitute a class of peptidases, which are characterized by the presence of a serine residue in the active center of the enzyme. Serine proteases participate in a wide range of functions in the body, including blood clotting, inflammation as well as digestion in prokaryotes and eukaryotes. The mechanism of cleavage by “serine proteases,” is based on nucleophilic attack of a targeted peptidic bond by a serine. Cysteine, threonine or water molecules associated with aspartate or metals also can play this role. Aligned side chains of serine, histidine and aspartate form a catalytic triad common to most serine proteases. The active site of serine proteases is shaped as a cleft where the polypeptide substrate binds. Amino acid residues are labeled from N to C termini of a polypeptide substrate (Pi, . . . , P3, P2, P1, P1′, P2′, P3′, . . . , Pj). The respective binding sub-sites are labeled (Si, . . . , S3, S2, S1, S1′, S2′, S3′, . . . , Sj). The cleavage is catalyzed between P1 and P1′. Proteases of the lower gastrointestinal tract are provided by the pancreas, which secretes bile into the gastrointestinal tract via the duodenum. Such proteases include, for example, trypsin, chymotrypsin, elastase, and carboxypeptidase.

[0099] As used herein term “pharmaceutically-acceptable excipients” includes any physiologically inert, pharmacologically inactive material known to one skilled in the art, which is compatible with the physical and chemical characteristics of the particular protease-resistant polypeptide selected for use. Pharmaceutically-acceptable excipients include, but are not limited to, polymers, resins, plasticizers, fillers, lubricants, solvents, co-solvents, buffer systems, surfactants, preservatives, sweetening agents, flavoring agents, pharmaceutical grade dyes or pigments, and viscosity agents. All or part of the pharmaceutically-acceptable excipients contained in the pharmaceutically compositions described herein can be part of the enteric coating.

[0100] As used herein, the term “enteric-coated oral dosage formulation” or “enteric-coated oral dosage form” relates to an oral dosage formulation containing a modified therapeutic protein that has an enteric coating to effect the release of the protease-resistant polypeptide in the lower intestinal tract. The enteric coating prevents early digestion or degradation of the tablet, capsule or other oral dosage form. The enteric coated oral dosage formulations, include, for example, a compressed tablet (coated or uncoated) containing granules, particles, which are themselves coated or uncoated, or a lyophilized powder of the protease-resistant polypeptide. The enteric coated oral dosage formulation can be a gelatin capsule (coated or uncoated) containing beads granules, particles, which are themselves coated or uncoated, or a lyophilized powder of the protease-resistant polypeptide.

[0101] As used herein, the term “enteric-coating” relates to a mixture of pharmaceutically-acceptable excipients which is applied to, combined with, mixed with or otherwise added to the protease-resistant polypeptide. The coating can be applied to a compressed tablet, a gelatin capsule, and/or the beads, granules, particles, or a lyophilized powder of the protease-resistant polypeptide, which are encapsulated into starch or gelatin capsules or compressed into tablets.

[0102] Accordingly, an enteric coating can be applied to a compressed tablet which contains granules, particles, or a lyophilized powder of the protease-resistant-polypeptide; however, in the event the granules or particles are themselves enterically-coated before being compressed into a tablet, then the enteric coating of the compressed tablet itself is optional. The enteric coating also can applied to the beads or small particles' of the protease-resistant-polypeptide, which can be encapsulated into a starch or gelatin capsule. The capsule can then be coated with an enteric coating, if desired. Because of their enteric coating, these oral dosage formulations will prohibit the undesirable delivery of the protease-resistant polypeptide to the mucosal and epithelial tissues of the upper gastrointestinal tract, especially the mouth, pharynx and esophagus. The coating also achieves the delivery of the active to the lower gastrointestinal tract at a point which can be manipulated by one skilled in the art by choosing the excipients which make up the coating, its type, and/or its thickness.

[0103] As used herein, a “therapeutic polypeptide” refers to any polypeptide that is administered for treatment of an animal, including a human. Such polypeptides can be prepared by any methods, and hence, include, but are not limited to, a recombinantly produced polypeptides, synthetically produced polypeptides, therapeutic polypeptides extracted from cells or tissues and other sources. As isolated from any sources or as produced, mature therapeutic polypeptides can be heterogeneous in length. Heterogeneity of therapeutic polypeptides can differ depending on the source of the therapeutic polypeptides. Hence reference to therapeutic polypeptides refers to the heterogeneous population as produced or isolated. When a homogeneous preparation is intended, it will be so-stated. References to therapeutic polypeptides herein are to their monomeric, dimeric or other multimeric forms, as appropriate.

[0104] Human therapeutic polypeptides include allelic variant isoforms, synthetic molecules produced from encoding nucleic acid molecules, proteins isolated from human tissue and cells, synthetic proteins, and modified forms thereof. Exemplary unmodified mature human therapeutic polypeptides include, but are not limited to, unmodified and native (i.e., wild-type) therapeutic polypeptides and the unmodified and native precursor therapeutic polypeptides that include a signal peptide and/or propeptide, and polymorphic native therapeutic polypeptides. Other exemplary human therapeutic polypeptides are those that are truncated at the N- or C-terminus.

[0105] Reference to therapeutic polypeptides also includes allelic or species variants of therapeutic polypeptides, and truncated forms or fragments thereof and forms that contain modifications in addition to those that increase protease resistance. Therapeutic polypeptides include homologous polypeptides from different species including, but not limited to animals, including humans and non-human species, such as other mammals. As with human therapeutic polypeptides, non-human therapeutic polypeptides also include heterogeneous lengths or fragments or portions of therapeutic polypeptides that are of sufficient length or include appropriate regions to retain at least one activity of full-length mature polypeptide.

[0106] Non-human therapeutic polypeptides include therapeutic polypeptides, allelic variant isoforms, synthetic molecules prepared from nucleic acids, protein isolated from non-human tissue and cells, and modified forms thereof. Therapeutic polypeptides of non-human origin include, but are not limited to, bovine, ovine, porcine, equine, murine, leporine, canine, feline, avian and other primate, such as chimpanzee and macaque, therapeutic polypeptides.

[0107] As used herein, “treating” a subject with a disease or condition means that the subject's symptoms are partially or totally alleviated, or remain static following treatment. Hence treatment encompasses prophylaxis, therapy and/or cure. Prophylaxis refers to prevention of a potential disease or condition and/or a prevention of worsening of symptoms or progression of a disease or condition. Prevention of a disease or condition encompasses alleviation or elimination of one or more risk factors for development of the disease or condition. Treatment also encompasses any pharmaceutical use of a modified therapeutic polypeptide and oral compositions provided herein.

[0108] As used herein, “patient” or “subject” to be treated includes humans or non-human animals. Mammals include primates, such as humans, chimpanzees, a gorillas and monkeys; domesticated animals, such as dogs, horses, cats, pigs, goats, cows; and rodents such as mice, rats, hamsters and gerbils.

[0109] As used herein, the term “gastrointestinal tract” relates to the alimentary canal, i.e., the musculo-membranous tube about thirty feet in length in a human subject, for example, extending from the mouth to the anus. As used herein, the term “upper gastrointestinal tract”, means the buccal cavity, the pharynx, the esophagus, and the stomach.

[0110] As used herein, the term “lower gastrointestinal tract” means the small intestine, and the large intestine.

[0111] As used herein, the term “buccal cavity” means the mouth or oral cavity and is lined with a mucous membrane which is continuous with the integument of the lips and with the mucous lining of the pharynx.

[0112] As used herein, the term “pharynx” relates to that part of the upper gastrointestinal tract which is placed behind the nose, mouth and larynx. The pharynx is a mucomembraneous tube about 4 inches in length and it is contiguous anteriorly with the mouth and posteriorly with the esophagus and is composed of a mucous coat, a fibrous coat, and a muscular coat.

[0113] As used herein, the term “esophagus” is a muscular canal about nine inches long extending from the pharynx to the stomach. The esophagus has three coats: an internal mucous coat surrounding the lumen, a middle areolar coat, and an external muscular coat.

[0114] As used herein, the term “stomach” means the part of the gastrointestinal tract between the esophagus and the small intestine.

[0115] As used herein, the term “small intestine” a means that part of the lower gastrointestinal tract that includes the duodenum, the jejunum, and the ileum, i.e., the portion of the intestinal tract just distal to the duodenal sphincter of the fundus of the stomach and proximal to the large intestine.

[0116] As used herein, the term “large intestine” includes the part of the lower gastrointestinal tract just distal to the small intestine, beginning with the cecum, including the ascending colon, the transverse colon, the descending colon, the sigmoid colon, and the rectum.

[0117] As used herein, “oromucosal” refers to refers to the mucosa lining the oral and/or nasopharyngeal cavities.

[0118] As used herein, the term “delayed-release” refers to a delivery of a protease-resistant polypeptide, which is effected by formulating the protease-resistant polypeptide in a pharmaceutical composition so that the release will be accomplished at some generally predictable location in the lower intestinal tract more distal to that which would have been accomplished if there had been no alteration in the delivery of the protease-resistant polypeptide. An exemplary method for effecting the delayed-release of the active ingredient involves coating (or otherwise encapsulating) the active ingredient with a substance which is not absorbed, or otherwise broken down, by the gastrointestinal fluids to release the active ingredient until a specific desired point in the intestinal tract is reached. An exemplary type of delayed-release formulation for use herein is achieved by coating the tablet, capsule, or particles, granules, or beads of active ingredient with a substance which is pH-dependent, i.e., broken down at a pH which is generally present in the small intestine, but not broken down at a pH which is generally present in the mouth, pharynx, esophagus or stomach. However, if it is desired to effect the topical delivery via the oral administration of a pharmaceutical composition containing the protease-resistant polypeptide to only the large intestine, or to the entire length of the intestinal tract beginning with the small intestine, then the selection of the coating material and/or the method of coating or otherwise combining the protease-resistant polypeptide with the selected coating material or other pharmaceutically-acceptable excipients can be varied or altered as is described herein or by any method known to one skilled in the art.

[0119] As used herein, AIDS wasting and other forms of cachexia are metabolic disorders that cause the body to consume vital muscle and organ tissue (lean body mass) for energy instead of primarily relying on the body's fat supplies. Subjects with AIDS wasting typically experience a loss of 5-10% or more of lean body mass, which includes muscle tissue, body organs, blood cells and lymphatic fluids

[0120] As used herein, the term “sustained-release” means the type of release mechanism designed to effect the delivery of the active ingredient over an extended period of time, as contrasted to the delivery of a delayed-release type dose. An exemplary sustained-release type method involves the coating of granules of the protease-resistant polypeptide with a pH-independent coating, chosen from the group including, but not limited to ethylcellulose, hydroxypropylmethylcellulose, methylcellulose, hydroxymethylcellulose, hydroxyethylcellulose, and sodium carboxymethylcellulose. Various sustained-release dosage forms can be fashioned by one skilled in the art to achieve the delivery of the protease-resistant polypeptide to the small intestine and the large intestine, to only the small intestine, or to only the large intestine, depending upon the choice of the various coating materials, and/or coating thickness.

[0121] As used herein, a therapeutic polypeptide dimer refers to a combination of two monomeric therapeutic polypeptides having the same or a different number of amino acids and/or different sequence of amino acids. Typically, dimeric forms of the polypeptide include those that contain two monomers linked via non-covalent interactions, including hydrophobic interactions, hydrogen bonds, van der Waals and other such interactions. Such dimers can form spontaneously when expressed and typically form spontaneously, such as, for example, as occurs using the methods of protein production described herein. Dimers also can be produced as fusion proteins, such as in the form of a single chain dimeric therapeutic polypeptide due to direct or indirect linkage of the same or different monomers. For purposes herein, the first monomer of a dimer is designated “A” and the second monomer of the dimer is designated “B.” Helices in each monomer are numbered, such that the helices in a polypeptide with six helices are designated A1-A6 for monomer A and B1-B6 for monomer B.

[0122] As used herein, an allelic variant or allelic variation references a polypeptide encoded by a gene that differs from a reference form of a gene (i.e., is encoded by an allele) among a population. Typically, the reference form of the gene encodes a native form and/or predominant form of a polypeptide from a population or single reference member of a species. Typically, allelic variants have at least 80%, 90%, 95% or greater amino acid identity with a native and/or predominant form from the same species.

[0123] As used herein, species variants refer to variants of the same polypeptide between and among species. Generally, interspecies allelic variants have at least about 60%, 70%, 80%, 85%, 90% or 95% identity or greater with a native and/or predominant form from another species, including 96%, 97%, 98%, 99% or greater identity with a native and/or predominant form of a polypeptide.

[0124] As used herein, “native therapeutic polypeptide” or “wild-type therapeutic polypeptide” refers to a therapeutic polypeptide encoded by a naturally occurring gene that is present in an organism in nature, such as in an animal, including a human or other mammal. Included among native therapeutic polypeptides are the encoded precursor polypeptide, fragments thereof, and processed forms thereof, such as a mature form lacking the signal peptide as well as any pre- or post-translationally processed or modified form thereof. For example, humans express therapeutic polypeptides. Exemplary of a native human therapeutic polypeptide is a precursor therapeutic polypeptide containing the signal peptide as well as a mature therapeutic polypeptide lacking the signal peptide. Also included among native therapeutic polypeptides are those that are post-translationally modified, including those that are proteolytically processed or that include other post-translational modifications such as, for example, glycosylation. Other animals, such as mammals, express native therapeutic polypeptides, and include, but are not limited to, hamsters, mice, rats, rabbits, birds, cows, horses, pigs, cats, dogs, monkeys, orangutans, baboons, chimpanzees, macaques, gibbons, and gorillas. As noted above, in nature, the polypeptides occur as a heterogeneous mixture that contains polypeptides of varying lengths and epigenetic modification, such as differences in glycosylation patterns.

[0125] As used herein, a “portion or fragment of a therapeutic polypeptide” or “an active portion” refers to any portion of a human or non-human therapeutic polypeptide that exhibits one or more activities of the full-length polypeptide.

[0126] As used herein, an “activity” of a therapeutic polypeptide refers to any activity exhibited by the therapeutic polypeptide. Such activities can be tested in vitro and/or in vivo. Activity can be any level of percentage of activity of the polypeptide, including but not limited to, 1% of the activity, 2%, 3%, 4%, 5%, 10%, 20%, 30%, 40%, 50%, 60%, 70%, 80%, 90%, 95% or more of functional activity compared to the full-length polypeptide. For example, percentage of activity of the polypeptide also includes 96%, 97%, 98%, 99%, 100%, 200%, 300%, 400%, 500%, or more of functional activity compared to the full-length polypeptide. Activities can be measured in vitro or in vivo using recognized assays. The results of such assays that indicate that a polypeptide exhibits an activity can be correlated to activity of the polypeptide in vivo, which can be referred to as biological activity.

[0127] As used herein, “EC50” refers to the effective concentration of a therapeutic polypeptide necessary to give one-half of a maximum response. For purposes herein, the response measured is any activity of a therapeutic polypeptide, such as but not limited to, antiviral activity or proliferation activity.

[0128] As used herein, “half-life” refers to the time required for a measured parameter, such as the potency, activity or effective concentration of a polypeptide or molecule to fall to half of its original level, such as half of its original potency, activity or effective concentration at time zero. Thus, the parameter, such as potency, activity, or effective concentration of a polypeptide molecule is generally measured over time. For purposes herein, half-life can be measured in vitro or in vivo. For example, the half-life of a therapeutic polypeptide or a modified therapeutic polypeptide can be measured in vitro by assessing its activity following incubation over time under certain conditions, such as for example, following exposure to proteases. In another example, the half-life of a therapeutic polypeptide or a modified therapeutic polypeptide can be measured in vivo following administration (e.g., intravenous, subcutaneous, intraduodenal, oral) of the polypeptide to a human or other animal, followed by sampling of the blood over time to determine the remaining effective concentration and/or activity of the polypeptide in the blood sample.

[0129] As used herein, a “property” of a therapeutic polypeptide refers to any property exhibited by such polypeptide. Such properties include, but are not limited to, protein stability, resistance to proteolysis, conformational stability, thermal tolerance, and tolerance to pH conditions. Changes in properties can alter an “activity” of the polypeptide.

[0130] As used herein, “serum stability” refers to protein stability in serum.

[0131] As used herein, a “directed evolution method” refers to methods that “adapt” either proteins, including natural proteins, synthetic proteins or protein domains to have changed properties, such as the ability to act in different or existing natural or artificial chemical or biological environments and/or to elicit new functions and/or to increase or decrease a given activity, and/or to modulate a given feature. Exemplary directed evolution methods include, among others, rational directed evolution methods described in U.S. application Ser. No. 10/022,249; and U.S. Published Application No. US-2004/0132977-A1.

[0132] As used herein, “two dimensional rational mutagenesis scanning (2-D scanning)” refers to the processes in which two dimensions of a particular protein sequence are scanned: (1) one dimension is to identify specific amino acid residues along the protein sequence to replace with different amino acids, referred to as is-HIT target positions, and (2) the second dimension is the amino acid type selected for replacing the particular is-HIT target, referred to as the replacing amino acid.

[0133] As used herein, “variant,” “therapeutic polypeptide variant,” “modified therapeutic polypeptide” and “modified therapeutic protein” refers to a therapeutic polypeptide that has one or more mutations compared to an unmodified therapeutic polypeptide. The one or more mutations can be one or more amino acid replacements, insertions or deletions and any combination thereof. Typically, a modified therapeutic polypeptide has one or more modifications in primary sequence compared to an unmodified therapeutic polypeptide. For example, a modified therapeutic polypeptide provided herein can have 1, 2, 3, 2, 5, 6, 7, 8, 9, 10, 11, 12, 13, 14, 15, 16, 17, 18, 19, 20 or more mutations compared to an unmodified therapeutic polypeptide. Modified therapeutic polypeptides provided herein include the specified or recited modification, but can be produced as heterogeneous mixtures and/or can be produced with a variety of lengths. Any length polypeptide is contemplated as long as the resulting polypeptide exhibits at least one therapeutic polypeptide activity.

[0134] As used herein, a “single amino acid replacement” refers to the replacement of one amino acid by another amino acid. The replacement can be by a natural amino acid or non-natural amino acids. When one amino acid is replaced by another amino acid in a protein, the total number of amino acids in the protein is unchanged.

[0135] As used herein, corresponding residues refer to residues compared among or between to polypeptides that are allelic or species variants or other isoforms. One of skill in the art can readily identify residues that correspond between or among such polypeptides. For example, by aligning the sequences of such polypeptides, one of skill in the art can identify corresponding residues, using conserved and identical amino acid residues as guides. In other instances, corresponding regions can be identified. One skilled in the art also can employ conserved amino acid residues as guides to find corresponding amino acid residues between and among human and non-human sequences.

[0136] As used herein, the phrase “structural homology” refers to the degree of coincidence in space between two or more protein backbones. Protein backbones that adopt the same protein structure, fold and show similarity upon three-dimensional structural superposition in space can be considered structurally homologous. Structural homology is not based on sequence homology, but rather on three-dimensional homology. Two amino acids in two different proteins that are homologous based on structural homology between those proteins do not necessarily need to be in sequence-based homologous regions. For example, protein backbones that have a root mean squared (RMS) deviation of less than 3.5, 3.0, 2.5, 2.0, 1.7 or 1.5 angstroms at a given space position or defined region between each other can be considered to be structurally homologous in that region and are referred to herein as having a “high coincidence” between their backbones. It is contemplated herein that substantially equivalent (e.g., “structurally related”) amino acid positions that are located on two or more different protein sequences that share a certain degree of structural homology have comparable functional tasks; also referred to herein as “structurally homologous loci.” These two amino acids are considered to be “structurally similar” or “structurally related” with each other, even if their precise primary linear positions on the sequences of amino acids, when these sequences are aligned, do not match with each other. Amino acids that are “structurally related” can be far away from each other in the primary protein sequences, when these sequences are aligned following the rules of classical sequence homology.

[0137] As used herein, “at a position corresponding to” refers to a position of interest (i.e., base number or residue number) in a nucleic acid molecule or protein relative to the position in another reference nucleic acid molecule or protein. The position of interest to the position in another reference protein can be in, for example, a precursor protein, an allelic variant, a heterologous protein, an amino acid sequence from the same protein of another species (i.e., species variant), etc. Corresponding positions can be determined by comparing and aligning sequences to maximize the number of matching nucleotides or residues, for example, such that identity between the sequences is greater than 95%, such as than 96%, 97%, 98%, 99% and higher. The position of interest is then given the number assigned in the reference nucleic acid molecule.

[0138] As used herein, the terms “homology” and “identity”” are used interchangeably, but homology for proteins can include conservative amino acid changes. In general to identify corresponding positions the sequences of amino acids are aligned so that the highest order match is obtained (see, e.g.: Computational Molecular Biology, Lesk, A. M., ed., Oxford University Press, New York, 1988; Biocomputing: Informatics and Genome Projects, Smith, D. W., ed., Academic Press, New York, 1993; Computer Analysis of Sequence Data Part I, Griffin, A. M., and Griffin, H. G., eds., Humana Press, New Jersey, 1994; Sequence Analysis in Molecular Biology, von Heinje, G., Academic Press, 1987; and Sequence Analysis Primer, Gribskov, M. and Devereux, J., eds., M Stockton Press, New York, 1991; Carillo et al. (1988) SIAM J Applied Math 48:1073).

[0139] As use herein, “sequence identity” refers to the number of identical amino acids (or nucleotide bases) in a comparison between a test and a reference polypeptide or polynucleotide. Homologous polypeptides refer to a pre-determined number of identical or homologous amino acid residues. Homology includes conservative amino acid substitutions as well identical residues. Sequence identity can be determined by standard alignment algorithm programs used with default gap penalties established by each supplier. Homologous nucleic acid molecules refer to a pre-determined number of identical or homologous nucleotides. Homology includes substitutions that do not change the encoded amino acid (i.e., “silent substitutions”) as well identical residues. Substantially homologous nucleic acid molecules hybridize typically at moderate stringency or at high stringency all along the length of the nucleic acid or along at least about 70%, 80%, 85%, 90%, 91%, 92%, 93%, 94%, 95%, 96%, 97%, 98%, or 99% of the full-length nucleic acid molecule of interest. Also contemplated are nucleic acid molecules that contain degenerate codons in place of codons in the hybridizing nucleic acid molecule. (For determination of homology of proteins, conservative amino acids can be aligned as well as identical amino acids; in this case, percentage identity and percentage homology vary). Whether any two nucleic acid molecules have nucleotide sequences (or any two polypeptides have amino acid sequences) that are at least 70%, 80%, 85%, 90%, 91%, 92%, 93%, 94%, 95%, 96%, 97%, 98% or 99% “identical” can be determined using known computer algorithms such as the “FAST A” program, using for example, the default parameters as in Pearson et al. Proc. Natl. Acad. Sci. USA 85: 2444 (1988) (other programs include the GCG program package (Devereux, J., et al., Nucleic Acids Research 12(I): 387 (1984)), BLASTP, BLASTN, FASTA (Atschul, S. F., et al., J. Molec. Biol. 215:403 (1990); Guide to Huge Computers, Martin J. Bishop, ed., Academic Press, San Diego (1994), and Carillo et al. SIAM J Applied Math 48: 1073 (1988)). For example, the BLAST function of the National Center for Biotechnology Information database can be used to determine identity. Other commercially or publicly available programs include, DNAStar “MegAlign” program (Madison, Wis.) and the University of Wisconsin Genetics Computer Group (UWG) “Gap” program (Madison Wis.)). Percent homology or identity of proteins and/or nucleic acid molecules can be determined, for example, by comparing sequence information using a GAP computer program (e.g., Needleman et al. J. Mol. Biol. 48: 443 (1970), as revised by Smith and Waterman (Adv. Appl. Math. 2: 482 (1981)). Briefly, a GAP program defines similarity as the number of aligned symbols (i.e., nucleotides or amino acids) which are similar, divided by the total number of symbols in the shorter of the two sequences. Default parameters for the GAP program can include: (1) a unary comparison matrix (containing a value of 1 for identities and 0 for non identities) and the weighted comparison matrix of Gribskov et al. Nucl. Acids Res. 14: 6745 (1986), as described by Schwartz and Dayhoff, eds., Atlas of Protein Sequence and Structure, National Biomedical Research Foundation, pp. 353-358 (1979); (2) a penalty of 3.0 for each gap and an additional 0.10 penalty for each symbol in each gap; and (3) no penalty for end gaps.

[0140] Therefore, as used herein, the term “identity” represents a comparison between a test and a reference polypeptide or polynucleotide. In one non-limiting example, “at least 90% identical to” refers to percent identities from 90 to 100% relative to the reference polypeptides. Identity at a level of 90% or more is indicative of the fact that, assuming for exemplification purposes a test and reference polynucleotide length of 100 amino acids are compared, no more than 10% (i.e., 10 out of 100) of amino acids in the test polypeptide differs from that of the reference polypeptides. Similar comparisons can be made between a test and reference polynucleotides. Such differences can be represented as point mutations randomly distributed over the entire length of an amino acid sequence or they can be clustered in one or more locations of varying length up to the maximum allowable, e.g., 10/100 amino acid difference (approximately 90% identity). Differences are defined as nucleic acid or amino acid substitutions, insertions or deletions. At the level of homologies or identities above about 85-90%, the result should be independent of the program and gap parameters set; such high levels of identity can be assessed readily, often without relying on software.

[0141] As used herein, the phrase “sequence-related proteins” refers to proteins that have at least 50%, at least 60%, at least 70%, at least 80%, at least 90%, at least 91%, at least 92%, at least 93%, at least 94%, at least 95%, at least 96%, at least 97%, at least 98% or at least 99% amino acid sequence identity or homology with each other.

[0142] As used herein, families of non-related proteins or “sequence-non-related proteins” refer to proteins having less than 50%, less than 40%, less than 30%, less than 20% amino acid identity, or homology with each other.

[0143] As used herein, it also is understood that the terms “substantially identical” or “similar” varies with the context as understood by those skilled in the relevant art.

[0144] As used herein, “a naked polypeptide chain” refers to a polypeptide that is not post-translationally modified or otherwise chemically modified, but contains only covalently linked amino acids.

[0145] As used herein, the amino acids that occur in the various sequences of amino acids provided herein are identified according to their known, three-letter or one-letter abbreviations (Table 1). The nucleotides which occur in the various nucleic acid fragments are designated with the standard single-letter designations used routinely in the art.

[0146] As used herein, an “amino acid” is an organic compound containing an amino group and a carboxylic acid group. A polypeptide contains two or more amino acids. For purposes herein, amino acids include the twenty naturally-occurring amino acids, non-natural amino acids, and amino acid analogs (e.g., amino acids wherein the α-carbon has a side chain).

[0147] As used herein, the abbreviations for any protective groups, amino acids and other compounds are, unless indicated otherwise, in accord with their common usage, recognized abbreviations, or the IUPAC-IUB Commission on Biochemical Nomenclature (1972) Biochem. 11: 1726). Each naturally occurring L-amino acid is identified by the standard three letter code (or single letter code) or the standard three letter code (or single letter code) with the “L-;” the “D-” indicates that the stereoisomeric form of the amino acid is D.

[0148] As used herein, “amino acid residue” refers to an amino acid formed upon chemical digestion (hydrolysis) of a polypeptide at its peptide linkages. The amino acid residues described herein are presumed to be in the “L” isomeric form. Residues in the “D” isomeric form, which are so designated, can be substituted for any L-amino acid residue as long as the desired functional property is retained by the polypeptide. “NH₂” refers to the free amino group present at the amino terminus of a polypeptide. “COOH” refers to the free carboxy group present at the carboxyl terminus of a polypeptide. In keeping with standard polypeptide nomenclature described in J. Biol. Chem., 243: 3552-3559 (1969), and adopted 37 C.F.R. §§ 1.821-1.822, abbreviations for amino acid residues are shown in Table 1:

TABLE 1
Table of Correspondence

SYMBOL

| 1-Letter | 3-Letter | AMINO ACID |
|---|---|---|
| Y | Tyr | tyrosine |
| G | Gly | glycine |
| F | Phe | phenylalanine |
| M | Met | methionine |
| A | Ala | alanine |
| S | Ser | serine |
| I | Ile | isoleucine |
| L | Leu | leucine |
| T | Thr | threonine |
| V | Val | valine |
| P | Pro | proline |
| K | Lys | lysine |
| H | His | histidine |
| Q | Gln | glutamine |
| E | Glu | glutamic acid |
| Z | Glx | Glu and/or Gln |
| W | Trp | tryptophan |
| R | Arg | arginine |
| D | Asp | aspartic acid |
| N | Asn | asparagine |
| B | Asx | Asn and/or Asp |
| C | Cys | cysteine |
| X | Xaa | Unknown or other |

[0149] It should be noted that all amino acid residue sequences represented herein by formulae have a left to right orientation in the conventional direction of amino-terminus to carboxyl-terminus. In addition, the phrase “amino acid residue” is broadly defined to include the amino acids listed in the Table of Correspondence (Table 1) and modified and unusual amino acids, such as those referred to in 37 C.F.R. §§ 1.821-1.822, and incorporated herein by reference. Furthermore, it should be noted that a dash at the beginning or end of an amino acid residue sequence indicates a peptide bond to a further sequence of one or more amino acid residues, to an amino-terminal group such as NH₂ or to a carboxyl-terminal group such as COOH.

[0150] As used herein, “naturally occurring amino acids” refer to the 20 L-amino acids that occur in polypeptides.

[0151] As used herein, the term “non-natural amino acid” refers to an organic compound that has a structure similar to a natural amino acid but has been modified structurally to mimic the structure and reactivity of a natural amino acid. Non-naturally occurring amino acids thus include, for example, amino acids or analogs of amino acids other than the 20 naturally occurring amino acids and include, but are not limited to, the D-isostereomers of amino acids. Exemplary non-natural amino acids are described herein and are known to those of skill in the art.

[0152] As used herein, “purified” preparations prepared from 1 cells or hosts or other sources refers to at least a purity of a cell extracts containing the indicated DNA or protein including a crude extract of the DNA or protein of interest. For example, in the case of a protein, a purified preparation can be obtained following an individual technique or a series of preparative or biochemical techniques, and the DNA or protein of interest can be present at various degrees of purity in these preparations. The procedures can include, but are not limited to, ammonium sulfate fractionation, gel filtration, ion exchange chromatography, affinity chromatography, density gradient centrifugation, and electrophoresis.

[0153] As used herein, a preparation of DNA or protein that is “substantially pure” or “isolated” refers to a preparation substantially free from naturally-occurring materials with which such DNA or protein is normally associated in nature and generally contains 5% or less of the other contaminants.

[0154] As used herein, a composition refers to any mixture of two or more products or compounds (e.g., agents, modulators, regulators, etc.). A composition includes a solution, a suspension, liquid, powder, a paste, aqueous, non-aqueous formulations or any combination thereof.

[0155] As used herein, a combination refers to any association between two or more items. Items of a combination for administration to a subject can be administered separately or together, used simultaneously or sequentially, or packaged together or packaged separately,

[0156] As used herein, an “article of manufacture” is a packaged composition. As used throughout this application, the term is intended to encompass pharmaceutical compositions of modified polypeptides and/or nucleic acids as described herein contained in articles of packaging optionally containing instructions for administration, particularly as an oral dosage formulation.

[0157] As used herein, a “kit” refers to a combination of a modified polypeptides or nucleic acid molecules as described herein provided in pharmaceutical compositions and another item for a purpose including, but not limited to, administration, diagnosis, and assessment of an activity or property of the polypeptides described herein. Kits, optionally, include instructions for use.

### B. GASTROINTESTINAL ABSORPTION AND DETECTION OF PROTEASE-RESISTANT POLYPEPTIDES

[0158] As shown herein, for therapeutic proteins that are not modified to be protease resistant by virtue of changes in their primary sequence, no amount of protein can be administered via oral administration that achieves delivery of therapeutically effective amounts of native, or wild-type, polypeptides to the bloodstream. This results from degradation of the polypeptides in the gastrointestinal tract by gastrointestinal proteases (FIG. 1A). The native polypeptides are susceptible to rapid degradation by proteases present in the lower intestinal tract (FIG. 1A(a-c)). Therefore, no therapeutic protein is available for adsorption from the gastrointestinal tract due to proteolytic degradation. Although native polypeptides can be formulated with coatings for enteric delivery this is not sufficient to effect resistance to proteases in the gastrointestinal tract to allow for release into the bloodstream. Once the enteric coating is dissolved and the native polypeptides are released into the lumen of the gastrointestinal tract, high levels of proteolytic degradation of the polypeptides prevent efficient absorption of the polypeptides from the intestine into the blood (FIG. 1A(d-e)). Hence, therapeutically effective amounts of the therapeutic polypeptide in the bloodstream cannot be achieved by oral delivery of the native polypeptide. The modified therapeutic proteins used in the oral dosage formulations and dosage units provided herein are more resistant to proteases in the bloodstream than therapeutic proteins not so-modified.

[0159] In contrast, as shown herein, protease-resistant polypeptides that are resistant to degradation by proteases, such as gastrointestinal proteases, are available for absorption and uptake into the blood (FIG. 1B). When released into the lumen of the gastrointestinal tract, the protease-resistance peptides are present in high concentrations due do their resistance to intestinal proteases (FIG. 1B(a-c)). As a result, therapeutically effective amounts of the proteases can be absorbed from the intestine into the bloodstream (FIG. 1B(d-e)). Additionally, resistance to proteolytic degradation in the digestive tract and in the bloodstream allows for sustained uptake of the protease-resistant therapeutic polypeptides. Hence, the protease-resistant polypeptides can be absorbed and maintained at therapeutically effective concentrations in the bloodstream over longer periods of time (FIG. 1B(f-h)). Thus, the protease-resistant polypeptides can be administered orally. Provided herein are dosage formulations that provide formulations of the protease-resistant polypeptides. Typically such formulations are tablets or capsules. Advantageously, they include enteric coatings that protect against the pH conditions of the stomach and allow for efficient delivery of the polypeptides to the lower digestive tract.

[0160] The absorption into the bloodstream of protease resistant polypeptides contained in the oral dosage formulations provided herein can be assessed following oral administration. Typically, following administration of the dosage formulation orally, blood is sampled 0.2, 0.5, 1, 2, 3, 4, 5, 6, 12, 24, or 48 hours following administration and the amount of the polypeptide present in the blood is assessed. The assessment of levels of protein over time permits analysis of the sustained presence of the polypeptide in the blood. If desired, the half-life of the polypeptide in the blood also can be determined.

[0161] In one example, the blood can be assayed for the presence of the polypeptide using routine protein screening assays. Such screening assays include, but are not limited to, Coomassie Blue Staining, Silver staining, Western Blot, and ELISA. In another example, the blood can be assayed for the presence of the polypeptide using functional activity assays. For example, anti-viral, anti-proliferation, chemotactic, coagulation, and other such activity assays can be used depending on the protein to be assayed. As exemplified in the examples herein, the absorption and activity of a protease resistant interferon-alpha (IFN-α) polypeptide in the bloodstream following oral administration is assessed in an anti-viral activity assay. In another example, the absorption and activity of a protease resistant growth hormone (GH) in the bloodstream following oral administration is assessed in a proliferation assay. Typically, such functional assays correlate with the amount of active polypeptide present in the bloodstream and can be an accurate indicator of polypeptides that retain activity and thereby are therapeutically active.

[0162] Generally, oral administration of the dosage formulations provided herein permits absorption of the protease resistant polypeptide at a therapeutically effective amount. The amount of polypeptide present in the blood that is at a therapeutically effective level can be empirically determined, and will differ based on the particular therapeutic polypeptide administered and the disease or disorder to be treated. In some cases, the therapeutically effective level of a polypeptide in the bloodstream is known based on standard treatments using the approved drugs of the same parent polypeptide. In other cases, such a therapeutic effective level can be empirically determined. For example, the therapeutically effective amount can be deduced from various in vitro and in vivo activity assays. Hence, the oral dosage formulation required to effect absorption of the polypeptide into the blood at levels sufficient to elicit an activity can be determined. For example, the Examples herein exemplify the assessment of oral dosage formulations required to effect absorption of the polypeptide into the blood such that the amount of polypeptide in the blood is sufficient for an activity (i.e. anti-viral or proliferation). In another example, animal models of a disease or condition can be used in order to assess the oral dosage formulation required to have an ameliorating or therapeutic effect on a disease or condition. For example, the Examples show a study assessing the effects of oral administration of dosage formulations of growth hormone in hypophysectomized rats. Hypophysectomized rat have been used as a model to study the effects of growth hormone deficiency on bone. Thus the use of such an animal model permits assessment of the oral dosage formulation required for absorption into the bloodstream of a therapeutic amount of polypeptide required to overcome such deficiency. Typically, such results in animal models can be extrapolated to humans. Thus, by virtue of their resistance to proteases in the digestive tract, particularly proteases in the esophagus, stomach and intestine, such dosage formulations containing protease resistant therapeutic proteins permit sustained release and absorption of the proteins into the blood stream following oral administration at amounts that are therapeutically effective. The advantage of an oral dosage formulation of a therapeutic protein over an injectable protein is that it could lead to increased patient compliance and savings related to medical assistance and patient care, devices for injection, manufacturing and purification of the protein and storage and transportation of products. For example, one of the drawbacks to injectables is the frequency of injection required, which is deterrent to patient compliance. While the development of some therapeutic proteins has focused on modifying polypeptides in order to decrease the frequency of administration (i.e. by pegylation, glycosylation, albumation, conjugating to Fc), a decreased frequency of administration is not a prerequisite for orally administered proteins, particularly those in the forms of tablets and capsules that can be easily and efficiently administered simply by swallowing (i.e. orally taking) the dosage formulation for release in the gastrointestinal tract. In some dosing regimes, however, the dosage formulations can be administered at a decreased frequency if desired.

[0163] Also, protease resistant polypeptides contained in the dosage formulations provided herein are modified with only a few amino acid changes (in many cases only a single change) in the primary sequence of the polypeptide. The mutations in the primary sequence themselves render the protease resistant to polypeptides. Further, because the polypeptide only contains a few changes, it can retain its activity to levels equal to, or in some cases greater than, the activity of the same polypeptide absent the mutations. This has advantages for several reasons. First, this means that the dosage formulation required to achieve a therapeutic effect is not limited by any change (i.e. decrease) of activity of the polypeptide. This is a problem with many therapeutic polypeptides, such as, for example, pegylated polypeptides, where the modification to the polypeptide renders the protein less active. Thus, to achieve a therapeutic effect, such therapeutic polypeptides must be administered at a higher dose.

[0164] Second, a change to only the primary sequence of the polypeptide means that there is no other processing requirements or requirements for mixing the therapeutic protein with other compounds in the formulation to effect protease resistance or absorption of the polypeptide into the bloodstream. Accordingly, the manufacturing of the dosage formulations is simplified. For example, as exemplified herein in the examples, tablets containing only the lyophilized protein can be manufactured for oral administration, i.e. the protease resistant proteins are orally available per se. As noted, it also is advantageous to include the dosage formulation in an enteric coating in order to further increase resistance of the polypeptides to protease, particularly upon route to the gastrointestinal tract upon oral administration.

### C. ORAL DOSAGE FORMULATIONS

[0165] Protease-resistant therapeutic polypeptides provided herein are administered orally in an amount such that therapeutically effective amount of the therapeutic polypeptide is delivered to the bloodstream. The amount is effective the treatment of a disease, disorder or condition, and depends upon the indication treated. The therapeutically effective amounts of the protease-resistant therapeutic polypeptides are provided dosage formulation, which contain one or a plurality of unit dosages. A unit dosage is a fractional amount up to a full amount of therapeutically effective protein. Unit dosages contain any suitable form of a protease-resistant therapeutic polypeptides, and optionally contain pharmaceutically acceptable carriers and coatings, such as enteric coatings.

[0166] The amount of protease-resistant therapeutic polypeptide in a dosage formulation generally are higher, generally about or 6-200 times, such as 10-100 times, including, for example, 15-50 times, 20-30 times, typically 15-40 times higher (depending upon the therapeutic protein and indication treated and the formulation) per day, than amounts that in a dosage formulation of a therapeutic protein, that is not modified to be protease resistant, for subcutaneous administration for the same indication. Dosage regimens for oral administration can differ from those for subcutaneous administration. For example, therapeutic proteins administered subcutaneously several times a week, can be administered daily in an oral regimen. Hence, total dosages in a particular time period, such as a week, can be substantially higher, such as 10-500 times more for oral administration compared to a the total amount administered in a week subcutaneously.

[0167] The amount of a protease-resistant polypeptide depends on absorption, inactivation and excretion rates of the active compound, the dosage schedule, and amount administered as well as other factors known to those of skill in the art. Its amount in a dosage unit also can vary but must be an amount that is suitable for oral ingestion. As described further herein, dosages can be determined empirically using dosages known in the art for administration of unmodified therapeutic polypeptides, and comparisons of properties and activities (e.g., protease resistance and activities) of the protease-resistant polypeptide compared to the unmodified and/or native polypeptide. As provided herein, oral dosage formulations of protease-resistant therapeutic polypeptide are higher, typically 10-600-fold, generally 10-100, 10-50, 15-40, 15-30, 20-40 fold, than a comparable dosage formulation of the therapeutic polypeptide not modified for protease resistance.

[0168] Any therapeutic protein can be modified to be protease resistant and provided in for oral administration as described herein. Exemplary oral dosage formulations, and dosage units therefor, for exemplary protease-resistant polypeptides, such as interferon-α (E41Q) (SEQ ID NO: 1995) and growth hormone (Y42I) (SEQ ID NO: 1318) are provided herein (see, e.g., the Examples below). Exemplary dosage units and oral dosage formulations for interferon-α (E41Q) are presented in Example 3 and Example 4. Exemplary dosage units and oral dosage formulations for growth hormone (Y42I) are presented in Example 22.

[0169] 1. Oral Dosage Units

[0170] Typically, the oral dosage formulations are provided as unit dosages, such as tablets and/or capsules that contain a single dosage amount or a fraction thereof. The oral dosage formulations are provided as dosage formulations that contain a sufficient amount of the therapeutic protein as a daily dosage to delivery a therapeutically effective amount to the bloodstream upon oral administration. The dosage formulations can contain one or a plurality of dosage units.

[0171] Oral dosage formulations of protease-resistant therapeutic proteins are provided. The formulations provide an amount of each protein that is sufficient to achieve a therapeutically effective level in the bloodstream upon administration. The therapeutically effective level depends upon the protein and indication treated. The formulations typically contain unit dosages, such as tablets and/or capsules, and can contain one or a plurality thereof.

[0172] Dosage units provided herein, include a protease-resistant polypeptide formulated alone or in combination with appropriate additives or excipients. For oral administration, the dosage units provided herein containing a protease-resistant polypeptide can take the form of, for example, tablets, pills, or capsules prepared by conventional means with pharmaceutically acceptable excipients. Compositions of protease-resistant polypeptides for oral administration can be formulated with additional factors, such as one or more therapeutic agents, useful in the disease or disorder to be treated. Such combinations of therapeutic agents for use in the compositions provided are described elsewhere herein. The pharmaceutical compositions provided herein can be formulated for single dosage (direct) administration or for dilution or other modification. The amount of the polypeptide in the dosage unit or oral dosage formulations is effective for delivery of an amount, upon administration, that is effective for the intended treatment. The compositions can be formulated for single dosage administration or for multiple dosage administration. The dosage unit formulations provided herein include delayed-release formulations and sustained-release formulations.

[0173] 2. Preparation of the Oral Dosage Formulation and Oral Dosage Units

[0174] Oral dosage formulations of protease-resistant polypeptides provided herein can be formulated in any conventional manner by mixing a selected amount of the polypeptide with one or more physiologically acceptable carriers or excipients. To formulate a composition, the weight fraction of a compound or mixture thereof is dissolved, suspended, dispersed, or otherwise mixed in a selected vehicle in a predetermined amount. The amount depends upon the number of dosage units to be administered per day or week and upon the therapeutic protein and condition treated. Selection of the carrier or excipient is within the skill of the administering professional and can depend upon a number of parameters. These include, for example, the form for oral administration (e.g., tablet, pill or capsule) and the disorder to be treated. Pharmaceutical carriers or vehicles suitable for administration of the compounds provided herein include any such carriers known to those skilled in the art to be suitable for oral administration. A variety of pharmaceutically acceptable excipients are known in the art (see, e.g., A. Gennaro (2000) “Remington: The Science and Practice of Pharmacy,” 2nd edition, Lippincott, Williams, & Wilkins; Pharmaceutical Dosage Forms and Drug Delivery Systems (1999) H. C. Ansel et al., eds., 7th ed., Lippincott, Williams, & Wilkins; and Handbook of Pharmaceutical Excipients (2000) A. H. Kibbe et al., eds., 3rd ed. Amer. Pharmaceutical Assoc., which each describe exemplary excipients). Hence, exemplary additives and excipients that can be used in oral dosage formulations provided include, but are not limited to, binding agents (e.g., pregelatinized maize starch, potato starch, acacia, polyvinylpyrrolidone, magnesium aluminum silicate, pectins, alginates, gelatin, gum such as gum arabic, gum tragacanth, guar gum, or a cellulose derivative such as ethyl cellulose, methyl cellulose, hydroxypropyl methylcellulose, hydroxypropylcellulose, or carboxymethyl cellulose); fillers (e.g., lactose, microcrystalline cellulose or calcium hydrogen phosphate); lubricants (e.g., magnesium stearate, calcium sulfate, talc or silica); disintegrants (e.g., potato starch, sodium starch glycolate, sodium carboxymethyl starch, agar, alginic acid and the sodium salt thereof, croscarmelose, crospovidone, clays, and ion exchange resins.); wetting agents (e.g., sodium lauryl sulphate); and diluents, buffering agents, solvents, co-solvents, surfactants, preservatives, pharmaceutical-grade dyes or pigments, viscosity agents, polymers, resins, plasticizers, and flavoring agents.

[0175] The protease-resistant therapeutic polypeptide is provided in solid or other suitable form, such as powder, crystal or gel, and mixed with an excipient(s). Procedures for preparation of the lyophilized powder, particles, and granules of the protease-resistant polypeptide for formulating an oral composition, such as a compressed tablet or pill, or for filling capsules are known, and/or can be modified to produce compositions with desired properties, including but not limited to, particle size, tackiness, yield, and dimer formation of the polypeptide. Such procedures can include alteration of lyophilization buffer conditions, such as adjustment of pH, salt content, sugar content and choice (e.g., mannitol or sucrose) or addition of other stabilization agents, such as for example, L-arginine. Manipulations of such conditions are within the knowledge of one of skill in the art. Exemplary procedures for modifying such conditions are presented herein in the Examples below and can used to modify the properties to resulting lyophilized protease-resistant polypeptide including, for example, particle size, tackiness, yield, and dimer formation of the polypeptide.

[0176] Further, moisture content of the oral composition can be varied with the addition or removal of one or more drying steps in the production of the lyophilized powder, particles, or granules of the protease-resistant polypeptide or in the preparation of the compressed tablet or pill.

[0177] In addition to the above mentioned variations, in order to obtain the desired release pattern, the excipients also can be varied, as long as they do not affect the activity of the particular protease-resistant polypeptide selected.

[0178] a. Delivery Control

[0179] As described herein, the site or the rate of delivery of the protease-resistant polypeptides in the intestinal tract can be controlled by one skilled in the art, by manipulating any one or more of the following: the type of the coating, and the concomitant desirable thickness and permeability, or swelling properties, of the coating; the time-dependent conditions of the coating itself or within the coated tablet, capsule, particle, bead, or granule; the particle size of the granulated protease-resistant polypeptide or dissolution properties of tablet formulation, such as the packing density of the tablet or thickness of the tablet; and the pH-dependent conditions of the coating itself and/or within the coated tablet, capsule, particle, bead, or granule. In particular, the solubility, acidity, and susceptibility to hydrolysis of the different protease-resistant polypeptides, and the properties of the lyophilized powder can be used as guidelines for the proper choice. In addition, suitable pH-conditions might be established within the coated tablets, particles, granules, or beads by adding a suitable buffer to the active ingredient in accordance with the desired release pattern. Further, some protease-resistant polypeptides are moisture sensitive and perform better if delivered in particular forms, such a tablet dosage form.

[0180] The dosage units in the oral dosage formulations provided herein permit reliable delivery of the therapeutic protein to the upper or lower intestinal tract, or any part thereof. If delivery to the lower intestinal tract only is desired, oral dosage formulations described here can effect such delivery, thereby prohibiting the exposure of protease-resistant polypeptide in the mucosal and epithelial tissues of the mouth, pharynx, and/or esophagus and inhibiting its release in the stomach. The oral dosage formulations render the protease-resistant polypeptide readily available for absorption from the lower gastrointestinal tract. Accordingly, oral dosage formulations suitable for use herein can be enteric-coated delayed-release formulations or enteric-coated sustained-release formulations.

[0181] Exemplary methods suitable for use in coating a compressed tablet containing a protease-resistant-polypeptide which will effect the delivery of the polypeptide to the small intestine are provided herein in the Examples. The Examples provided herein describe oral dosage formulations for exemplary protease-resistant polypeptides, such as interferon-α (E41Q) (SEQ ID NO: 1995) and growth hormone (Y42I) (SEQ ID NO: 1318). Exemplary oral dosage formulations for interferon-α (E41Q) are presented in Example 3 and Example 4. Exemplary oral dosage formulations for growth hormone (Y42I) are presented in Example 22.

[0182] i. Enteric Coatings

[0183] Enteric-coated oral dosage formulations of protease-resistant polypeptides can help effect delivery to the lower intestine (e.g., to the small intestine) of a human or other mammal. The enteric-coated oral dosage formulations contain an amount of a protease-resistant polypeptide and pharmaceutically-acceptable excipients. The enteric-coating of the tablet or capsule not soluble in the fluids of the mouth, the pharynx, the esophagus, or the stomach and thereby prohibits the release of the protease-resistant polypeptide until the lower is intestine is reached, e.g., the small intestine. In addition to coated tablets and capsules, oral dosage formulations can take other forms, such as a gelatin capsule that contains beads or small particles of the protease-resistant polypeptide which have themselves been enterically coated.

[0184] Enteric coatings are typically made with suitable pharmaceutical excipients including, but not limited to, Eudragit® L, Eudragit® L-100, Eudragit® S, Eudragit® S-100, Eudragit® L 30 D-55, Eudragit® 100-55, hydroxypropyl methylcellulose acetate succinate (HPMCAS), hydroxypropyl methyl cellulose phthalate (HPMCP), cellulose acetate phthalate (CAP), polyvinyl phthalic acetate (PVPA), cellulose acetate trimellatate, polyethylene glycol 400-8000, triacetin, dibutyl phthalate, acetylated monoglycerides, shellac, triethyl citrate, talc, and iron oxide.

[0185] An exemplary oral dosage formulation of a protease-resistant polypeptide is an enteric-coated compressed tablet, which is formulated from granules, particles, or a lyophilized powder of the protease-resistant polypeptide. Tablets can be made combining, mixing or otherwise adding the protease-resistant polypeptide to suitable pharmaceutical excipients as exemplified above. That mixture is then compressed into a tablet utilizing various tableting techniques available to those skilled in the art. The compressed tablet is then coated with an enteric-coating material, utilizing methods well known in the art, including numerous spraying techniques available to those skilled in the art.

[0186] An exemplary oral dosage formulation which effects delivery to the small intestine contains a protease-resistant polypeptide and has a pH dependent enteric coating material made from a partly methyl esterified methacrylic acid polymer. The solid oral dosage formulation can be in the form of an enteric coated compressed tablet made of granules, particles, or a lyophilized powder of the protease-resistant polypeptide. In a particular example the protease-resistant polypeptide is produced in the form of a lyophilized powder.

[0187] Any enteric coating which is insoluble at a pH below 5.5 (i.e., that generally found in the mouth, pharynx, esophagus and stomach), but soluble at pH 5.5 or above (i.e., that present in the small intestine and the large intestine) can be used in the oral dosage formulations provided. Accordingly, when it is desired to effect the delivery of the protease-resistant polypeptide to the small intestine, any enteric coating is suitable, which is wholly- or partially-insoluble at a pH below 5.5 and soluble at pH 5.5 or above.

[0188] The partly methyl esterified methacrylic acid polymer can be applied to the compressed tablet, the gelatin capsule and/or the beads, particles or granules of the protease-resistant polypeptide in a sufficient thickness so that the entire coating does not dissolve in gastrointestinal fluids at a pH below 5.5, but does dissolve at a pH of 5.5 or above. The dissolution or disintegration of the excipient coating generally does not occur until the entry of the coated dosage form into the small intestine. In particular, there is substantially no release of the protease-resistant polypeptide upstream of the duodenum.

[0189] Any anionic polymer exhibiting the requisite pH-dependent solubility profile can be used as an enteric coating in the practice of the present methods to achieve delivery of the protease-resistant polypeptide to the lower intestine. The coating chosen must be compatible with the particular protease-resistant polypeptide selected. Exemplary polymers for use in the dosage forms provided are anionic carboxylic polymers. In a particular example, the polymers are acrylic polymers, such as partly methyl-esterified methacrylic acid polymers, in which the ratio of anionic free carboxyl groups to ester groups is about 1:1.

[0190] An exemplary methacrylic acid-methyl methacrylate copolymer, which is suitable for use in coating the oral dosage formulations and/or the granules, particles or beads of the protease resistant-polypeptide, which can be employed in the method of treatment described herein, either alone or in combination with other coatings, is Eudragit L®, particularly Eudragit® L-100, manufactured by Rohm Pharma GmbH, Weiterstadt, West Germany. In Eudragit® L-100, the ratio of free carboxyl groups to ester groups is approximately 1:1. Further, the copolymer is known to be insoluble in gastrointestinal fluids having a pH below 6.0, generally 1.5-6.0, i.e., that generally present in the fluid of upper gastrointestinal tract (e.g., stomach <pH 5.5) and duodenum (e.g., pH 5.5-6.0), but readily soluble at pH above 6.0, i.e., that generally present in the fluid of the lower gastrointestinal tract, particularly in the jejunum of the small intestine.

[0191] Other formulations of Eudragit® L include Eudragit® L 30 D-55 which allow delivery the protease-resistant polypeptide at pH>5.5. Such coating can be used to effect delivery of the protease-resistant polypeptide in the duodenum, prior to entry into the jejunum of the small intestine.

[0192] Another exemplary methacrylic acid-methyl methacrylate copolymer, which is suitable for use in coating the oral dosage formulations and/or the granules, particles or beads of the protease resistant-polypeptide, which can be employed in the method of treatment described herein, either alone or in combination with other coatings, is Eudragit® S-100, manufactured by Rohm Pharma GmbH, Weiterstadt, West Germany. Eudragit® S differs from Eudragit® L-100 only insofar as the ratio of free carboxyl groups to ester groups is approximately 1:2. Eudragit® S-100 is also, like Eudragit® L-100, is insoluble at pH below 5.5, generally 1.5-5.5, such as that present in gastric juice, but, unlike Eudragit® L-30-D, is poorly soluble in gastrointestinal fluids having a pH of 5.5-7.0, such as that present in upper small intestinal juice. The copolymer is soluble at pH 7.0 and above, i.e., that generally present in the lower small intestine (i.e., ileum) and colon.

[0193] Eudragit® S-100 can be used alone as a coating which would provide delivery of the protease-resistant polypeptide at the ileum via a delayed-release mechanism. In addition, Eudragit® S-100, being poorly soluble in intestinal juice below pH 7.0, can be used in combination with Eudragit® L coatings such as Eudragit® L-100 or Eudragit® L 30 D-55, in order to effect a delayed-release, composition that can be formulated to deliver the active ingredient at various segments of the intestinal tract; the more Eudragit® L used, the more proximal release and delivery begins and the more Eudragit® S used, the more distal release and delivery begins.

[0194] The coating can, contain a plasticizer and possibly other coating excipients such as coloring agents, talc, and/or magnesium stearate, many of which are well known in the coating art. In particular, anionic carboxylic acrylic polymers can contain 10-25% by weight of a plasticizer, e.g., dibutyl phthalate, polyethylene glycol, triethyl citrate, triacetin, glyceryltriacetate, acetyltriethylcitrate, dibutyl sebacate, diethylphthalate, polyethylene glycol having a molecular weight in the range of 200 to 8000, glycerol, castor oil, copolymers of propylene oxide and ethylene oxide, or mixtures thereof. Conventional coating techniques such as spray or pan coating can be employed to apply the coating. As described herein, the coating thickness must be sufficient to ensure that the oral dosage formulation remains intact until the desired site of topical delivery in the lower intestinal tract is reached.

[0195] As described herein, the solid oral dosage formulation can be in the form of a coated compressed tablet which contains granules, particles, or a lyophilized powder of the protease-resistant polypeptide or of a gelatin capsule, coated or uncoated, which contains beads of the protease-resistant polypeptide, which themselves are enteric coated.

[0196] In an exemplary coating method described herein utilizing methylacrylate copolymers, when the desired site of delivery is the small intestine, a coating thickness of between 20 and 100 microns usually is required. In a particular example, the coating thickness is between 30 and 75 microns. In another particular example, the coating thickness is between 30 and 50 microns. The thickness of coating required on the tablets or capsules will depend upon the dissolution profile of the particular coating materials and possibly also upon the dissolution profile of the enteric coating on the capsule. It is well within the ability of one of skill in the art to determine by standard testing procedure the optimum thickness of a particular coating required for a particular dosage form.

[0197] ii. Multiple Coatings and Sub-Coatings

[0198] In another non-limiting example of an oral dosage formulation, protease-resistant polypeptides can be formulated with one or more pharmaceutical excipients and coated with an enteric coating (see, e.g., U.S. Pat. No. 6,346,269). For example, a solution containing a solvent, a protease-resistant polypeptide, and a stabilizer is coated onto a core containing pharmaceutically acceptable excipients, to form an active agent-coated core; a sub-coating layer is applied to the active agent-coated core, which is then coated with an enteric coating layer. The core generally includes the protease-resistant polypeptide and one or more pharmaceutically acceptable additives or excipients as described herein. The sub-coating layer can contain one or more of an adhesive, a plasticizer, and an anti-tackiness agent. Suitable anti-tackiness agents include, but are not limited to, talc, stearic acid, stearate, sodium stearyl fumarate, glyceryl behenate, kaolin and aerosil. Exemplary adhesives include polyvinyl pyrrolidone (PVP), gelatin, hydroxyethyl cellulose (HEC), hydroxypropyl cellulose (HPC), hydroxypropyl methyl cellulose (HPMC), vinyl acetate (VA), polyvinyl alcohol (PVA), methyl cellulose (MC), ethyl cellulose (EC), hydroxypropyl methyl cellulose phthalate (HPMCP), cellulose acetate phthalates (CAP), xanthan gum, alginic acid, salts of alginic acid, Eudragit®, copolymer of methyl acrylic acidlmethyl methacrylate with polyvinyl acetate phthalate (PVAP). Suitable plasticizers include glycerin, polyethylene glycol, triethyl citrate, tributyl citrate, propanyl triacetate and castor oil. Exemplary enteric soluble coating materials include hydroxypropyl methylcellulose acetate succinate (HPMCAS), hydroxypropyl methyl cellulose phthalate (HPMCP), cellulose acetate phthalate (CAP), polyvinyl phthalic acetate (PVPA), Eudragit® and shellac.

[0199] b. Other Delivery Additives and Carriers

[0200] In other non-limiting examples of an oral dosage formulation, protease-resistant polypeptides can be formulated together with any of the following: microgranules (see, e.g., U.S. Pat. No. 6,458,398); biodegradable macromers (see, e.g., U.S. Pat. No. 6,703,037); biodegradable hydrogels (see, e.g., Graham and McNeill (1989) Biomaterials 5:27-36); biodegradable particulate vectors (see, e.g., U.S. Pat. No. 5,736,371); bioabsorbable lactone polymers (see, e.g., U.S. Pat. No. 5,631,O15); slow release protein polymers (see, e.g., U.S. Pat. No. 6,699,504; Pelias Technologies, Inc.); a poly(lactide-co-glycolide/polyethylene glycol block copolymer (see, e.g., U.S. Pat. No. 6,630,155; Atrix Laboratories, Inc.); a composition containing a biocompatible polymer and particles of metal cation-stabilized agent dispersed within the polymer (see, e.g., U.S. Pat. No. 6,379,701; Alkermes Controlled Therapeutics, Inc.); and microspheres (see, e.g., U.S. Pat. No. 6,303,148; Octoplus, B.V.).

[0201] In other non-limiting examples of an oral dosage formulation, protease-resistant polypeptides can be formulated together with any of the following: a carrier such as, for example, EmisphereQ (Emisphere Technologies, Inc.); TIMERx, a hydrophilic matrix combining xanthan and locust bean gums which, in the presence of dextrose, form a strong binder gel in water (Penwest); Geminex™ (Penwest); Procise™ (Claxo SmithKline); SAVIT™ (Mistral Pharma Inc.); RingCap™ (Alza Corp.); Smartrix® (Smartrix Technologies, Inc.); SQZgel™ (MacroMed, Inc.); Geomatrix™ (Skye Pharma, Inc.); Oros® Tri-layer (Alza Corporation).

[0202] In other non-limiting examples of an oral dosage formulation, protease-resistant polypeptides can be formulated as described in U.S. Pat. No. 6,296,842 (Alkermes Controlled Therapeutics, Inc.); and U.S. Pat. No. 6,187,330 (Scios, Inc.).

[0203] In other non-limiting examples of an oral dosage formulation, protease-resistant polypeptides can contain an intestinal absorption enhancing agent. Suitable intestinal absorption enhancers include, but are not limited to, calcium chelators (e.g., citrate, ethylenediamine tetracetic acid); surfactants (e.g., sodium dodecyl sulfate, bile salts, palmitoylcamitine, and sodium salts of fatty acids); and toxins (e.g., zonula occludens toxin).

[0204] The modified polypeptides for use in the oral dosage formulations provided herein exhibit increased resistance to proteolysis in the gastrointestinal tract. Thus, preparations for oral administration can be suitably formulated without the use of protease inhibitors, such as a Bowman-Birk inhibitor, a conjugated Bowman-Birk inhibitor, aprotinin and camostat. Such compounds, however, are not excluded from use in the compositions provided.

### D. PROTEASE-RESISTANT POLYPEPTIDES FOR ORAL DOSAGE FORMULATIONS

[0205] 1. Protease Resistant Polypeptides

[0206] Protease-resistant polypeptides for use in the oral dosage formulations provided herein include any polypeptide that has increased resistance to one or more proteases compared to the native form of the polypeptide due to replacement of one or more amino acids in the primary amino acid sequence of the polypeptide. Protease-resistant polypeptides for use in the oral dosage formulations provided herein include therapeutic polypeptides. Such polypeptides include, but are not limited to, protease-resistant forms of polypeptides selected from exemplary protein families, such as, but not limited to, coagulation factors, cytokines, growth factors, hormones, hydrolases, immunoglobulins, inhibitor proteins, nuclear proteins, and proteases. The proteases to which the proteins are resistant or more resistant that prior to modification include those are those present in the bloodstream.

[0207] Numerous such polypeptides are known and described (see, e.g., U.S. Patent Application Publication Nos. 2004/0132977-A1, US 2005/0202438-A1, US 2006/0251619-A1, US 2006/0094655-A1; U.S. Provisional Application Nos. 60/787,208, 60/861,615; International PCT Application Publication Nos. WO2006/020580, WO 2004/022593, WO 2004/022747, WO2006048777; and International PCT Application No. IB2006/002034).

[0208] Exemplary protease-resistant polypeptides for use in the oral dosage formulations provided herein are provided in SEQ ID NOS: 2-46, 48-84, 86-117, 119-146, 148-660, 662-808, 810-859, 861-916, 918-945, 947-994, 996-1017-, 1019-1043, 1045-1079, 1081-1125, 1127-1147, 1149-1180, 1182-1214, 1216-1259, 1261-1885, 1887-1981, 1983-2066, and 2176-2182 as well allelic and species variants thereof. For exemplification purposes, the Examples, below, detail studies using oral formulations interferon-α (IFN-α) and growth hormone (hGH). The Examples show how dosages can be selected for a particular therapeutic protein, and also demonstrate the effectiveness of oral tablet and capsule formulations of IFN-α and hGH.

[0209] Exemplary protease-resistant polypeptides for use in the oral dosage formulations provided include species and allelic variants of the polypeptides exemplified herein. Modifications for protease resistance in the primary sequence of amino acids with respect to an exemplary polypeptide provided herein also can be made at corresponding positions in species or allelic variants of the polypeptide. Such modified species and allelic variants also can be used in the oral dosage formulations provided.

[0210] Modifications for protease resistance in the primary sequence of amino acids at corresponding amino acid positions can be made in polypeptides that are species or allelic variants or homologous to or are members of the same protein family as the polypeptides exemplified herein. For example, by virtue of the knowledge of the 3-dimensional structural amino acid positions within exemplary protease-resistant mutants provided herein that confer higher resistance to a challenge with either proteases or blood lysate or serum, while maintaining or improving the requisite biological activity, the corresponding structurally related (e.g., structurally similar) amino acid residues on a variety of other polypeptides can be identified. Such modified homologous polypeptides or modified protein family members also can be used in the oral dosage formulations provided (see, e.g., U.S. application Ser. No. 10/658,834, which describes such methods).

[0211] Numerous methods are well known in the art for identifying structurally related amino acid positions with 3-dimensionally structurally homologous proteins. Exemplary methods include, but are not limited to: CATH (Class, Architecture, Topology and Homologous superfamily) which is a hierarchical classification of protein domain structures based on four different levels (Orengo et al., Structure, 5(8):1093-1108 (1997)); CE (Combinatorial Extension of the optimal path), which is a method that calculates pairwise structure alignments (Shindyalov et al., Protein Engineering, 11(9):739-747 (1998)); FSSP (Fold classification based on Structure-Structure alignment of Proteins), which is a database based on the complete comparison of all 3-dimensional protein structures that reside in the Protein Data Bank (PDB) (Holm et al., Science, 273:595-602 (1996)); SCOP® (Structural Classification of Proteins) Database, which provides a descriptive database based on the structural and evolutionary relationships between all proteins whose structure is known (Murzin et al., J. Mol. Biol., 247:536-540 (1995)); and VAST (Vector Alignment Search Tool) Database, which compares newly determined 3-dimensional protein structure coordinates to those found in the MMDB/PDB database (Gibrat et al., Current Opinion in Structural Biology, 6:377-385 (1995)).

[0212] In one example, publicly available programs, such as the program referred to as TOP (Lu, G., J. Appl. Cryst., 33:176-189 (2000)) can be used for protein structure comparison. This program runs two steps for each protein structure comparison. In the first step topology of secondary structure in the two structures is compared. The program uses two points to represent each secondary structure element (alpha helices or beta strands) then systematically searches all the possible super-positions of these elements in 3-dimensional space (defined as the root mean square deviation—rmsd, the angle between the two lines formed by the two points and the line-line distance). The program searches to determine whether additional secondary structure elements can fit by the same superposition operation. If secondary structures that can fit each other exceed a given number, the programidentifies the two structures as similar. The program gives as an output a comparison score called “Structural Diversity” that considers the distance between matched α-carbon atoms and the number of matched residues. The lower the “Structural Diversity” score, the more the two structures are similar.

[0213] Among the protease-resistant polypeptides for use in oral dosage formulations provided herein are polypeptides modified to increase stability to conditions amendable to oral delivery, which includes administration to gastrointestinal tract, but also resistance to proteases in the bloodstream. Such modifications can include those that result in a detectable increase in protein-half life under one or more conditions such as exposure to saliva, exposure to proteases in the gastrointestinal tract, and exposure to particular pH conditions, such as the low pH of the stomach and/or pH conditions in the intestine. Modifications can include resistance to one or more proteases including pepsin, trypsin, chymotrypsin, elastase, aminopeptidase, gelatinase B, gelatinase A, α-chymotrypsin, carboxypeptidase, endoproteinase Arg-C, endoproteinase Asp-N, endoproteinase Glu-C, endoproteinase Lys-C, and trypsin, luminal pepsin, microvillar endopeptidase, dipeptidyl peptidase, enteropeptidase, hydrolase, NS3, elastase, factor Xa, Granzyme B, thrombin, trypsin, plasmin, urokinase, tPA and PSA. Modifications also can include increasing overall stability to potentially denaturing or conformation-altering conditions such as thermal tolerance, and tolerance to mixing and aeration (e.g., chewing).

[0214] Protease-resistant polypeptides can be generated or identified or produced by any method known in the art including, but not limited to, directed evolution methods such as 2D- and 3D-scanning mutagenesis methods for protein rational evolution (see, e.g., U.S. Publication Nos. US 2005/0202438 A1 and US-2004/0132977-A1 and published International applications WO 2004/022593 and WO 2004/022747). Modification of polypeptides for suitability for oral delivery can include removal of proteolytic digestion sites and/or increasing the overall stability of the protein structure. Such polypeptide variants exhibit increased protease-resistance compared to an unmodified and/or native polypeptide in one or more conditions for oral delivery, which include exposure to proteases.

[0215] In one example, the protease resistance of the variant polypeptides for use in oral dosage formulations provided herein is assessed by measuring protein concentration or residual activity in the presence of one or more proteases such as pepsin, trypsin, chymotrypsin, elastase, aminopeptidase, gelatinase B, gelatinase A, α-chymotrypsin, carboxypeptidase, endoproteinase Arg-C, endoproteinase Asp-N, endoproteinase Glu-C, endoproteinase Lys-C, and trypsin, luminal pepsin, microvillar endopeptidase, dipeptidyl peptidase, enteropeptidase, hydrolase, NS3, elastase, factor Xa, Granzyme B, thrombin, trypsin, plasmin, urokinase, tPA and PSA. The variant polypeptide can be mixed with one or more proteases and then assessed for activity and/or protein structure after a suitable reaction time. Assessment of residual activity also can include exposure to increased temperature, such as the body temperature of a subject; exposure to gastric juices and/or simulated gastric juices; exposure to particular pH conditions and/or a combination of two or more conditions. Following exposure to one or more conditions, activity and/or assessment of protein structure can be used to assess the stability and/or resistance to proteolytic digestion of the variant polypeptide in comparison to an appropriate control (e.g., an unmodified and/or native polypeptide).

[0216] Protease-resistant forms of therapeutic polypeptides can be administered to a subject for the prevention or treatment of any disease or condition for which the native form of the polypeptide has been used for the prevention or treatment of such disease(s) or condition(s).

[0217] Modified polypeptides for use in the oral dosage formulations provided also include protease-resistant polypeptides that have been further modified by glycosylation, carboxylation, hydroxylation, hasylation, carbamylation, sulfation, phosphorylation, and/or PEGylation.

[0218] Modified polypeptides for use in the oral dosage formulations provided also include protease-resistant polypeptides that have been further modified by one or more amino acid modifications that contribute to, for example, increased activity, altered immunogenicity, stability, thermal tolerance, protease-resistance, glycosylation, carboxylation, hydroxylation, hasylation, carbamylation, sulfation, phosphorylation, and/or PEGylation. Such amino acid modifications can be natural amino acids, non-natural amino acids or a combination of natural and non-natural amino acids. The protease-resistant polypeptides for use in the oral dosage formulations provided also can be conjugated or expressed as a fusion protein with one or more proteins or peptides, such as albumin.

[0219] 2. Cytokines

[0220] Examples of protease-resistant polypeptides for use in the oral dosage formulations provided herein include polypeptides of the cytokine superfamily. Modified cytokine polypeptides for use in the oral dosage formulations provided contain one or more amino acid replacements at one or more target positions and exhibit greater resistance to proteolysis compared to the cytokine protein without the one or more amino acid replacements.

[0221] Cytokines all share a common helix bundle fold, which is used to structurally define the 4-helical cytokine superfamily in the structural classification of the protein database SCOP© (Structural Classification of Proteins; see, e.g., Murzin et al., J. Mol. Biol., 247:536-540, 1995 and “scop.mrc-lmb.cam.ac.uk/scop/”). This superfamily includes three different families: 1) the interferons/interleukin-10 protein family; 2) the long-chain cytokine family; and 3) the short-chain cytokine family. Although the degree of similarity among the underlying amino acid sequences of these cytokines does not appear high, their corresponding 3-dimensional structures present a high level of similarity. Effectively, the best structural similarity is obtained between two 3-dimensional protein structures of the same family in the 4-helical cytokine superfamily.

[0222] An exemplary distinct feature of cytokines from the interferons/interleukin-10 family is an additional (fifth) helix. This family includes, for example, interleukin-10 (IL-10; SEQ ID NO: 809), interferon beta (IFN-β; SEQ ID NO: 147), interferon alpha-2a (IFNα-2a; SEQ ID NO: 2162), interferon alpha-2b (IFNα-2b; SEQ ID NO: 2067), and interferon gamma (IFN-γ; SEQ ID NO: 661).

[0223] The long-chain cytokine protein family includes, among others, granulocyte colony stimulating factor (G-CSF; SEQ ID NO: 47), leukemia inhibitory factor (LIF; SEQ ID NO: 1148), growth hormone (hGH; SEQ ID NO: 1260), ciliary neurotrophic factor (CNTF; SEQ ID NO: 1), leptin (SEQ ID NO: 1126), oncostatin M (SEQ ID NO: 1181), interleukin-6 (IL-6; SEQ ID NO: 1080) and interleukin-12 (IL-12; SEQ ID NO: 860).

[0224] The short-chain cytokine protein family includes, among others, erythropoietin (EPO; SEQ ID NO: 1886), granulocyte-macrophage colony stimulating factor (GM-CSF; SEQ ID NO: 85), interleukin-2 (IL-2; SEQ ID NO: 946), interleukin-3 (IL-3; SEQ ID NO: 995), interleukin-4 (IL-4; SEQ ID NO: 1018), interleukin-5 (IL-5; SEQ ID NO: 1044), interleukin-13 (IL-13; SEQ ID NO: 917), Flt3 ligand (SEQ ID NO: 118) and stem cell factor (SCF; SEQ ID NO: 1215).

[0225] Modified cytokines for use in the oral dosage formulations provided include allelic and species variants of such cytokines containing corresponding modifications for protease resistance.

[0226] a. Interferon/Interleukin-10 Family

[0227] As set forth above, provided herein are oral dosage formulations that contain modified cytokines that contain one or more amino acid replacements at one or more target positions in polypeptides of the interferon/interleukin-10 family.

[0228] In a particular example of an oral dosage formulation, the protease-resistance polypeptide is a modified interferon, such as interferon-α (IFN-α). Exemplary IFN-α protease-resistant polypeptides include one or more amino acid modifications in an IFN-α2b polypeptide, where the one or more amino acid replacements lead to greater resistance to proteases. Such modifications include, but are not limited to, modifications shown in Table 2, where the replacements are made compared to the sequence of amino acids set forth in SEQ ID NO: 2067. In reference to such mutants, the first amino acid (one-letter abbreviation) corresponds to the amino acid that is replaced, the number corresponds to position in the IFN-α2b polypeptide sequence with reference to SEQ ID NO: 2067, and the second amino acid (one-letter abbreviation) corresponds to the amino acid selected that replaces the first amino acid at that position. In Table 2, the sequence identifier (SEQ ID NO.) for the accompanying Sequence Listing is in parenthesis next to each substitution. Such exemplary polypeptides can be used in the oral dosage formulations provided herein.

TABLE 2
Interferon-α (IFN-α) Modifications to Increase Resistance to Proteolysis

| P4A (1983) | L3V (1984) | R12H (1985) | R13H (1986) | M16V (1987) |
|---|---|---|---|---|
| M16I (1988) | R22H (1989) | F27I (1990) | F27V (1991) | L30I (1992) |
| K31Q (1993) | R33H (1994) | E41Q (1995) | E41H (1996) | E58Q (1997) |
| E58H (1998) | K70T (1999) | E78Q (2000) | E78H (2001) | Y89I (2002) |
| E107Q (2003) | E107H (2004) | P109A (2005) | L110V (2006) | M111I (2007) |
| E113Q (2008) | E113H (2009) | L117V (2010) | L117I (2011) | K121Q (2012) |
| K121T (2013) | R125H (2014) | R125Q (2015) | L128V (2016) | L128I (2017) |
| K131Q (2018) | K131T (2019) | E132Q (2020) | E132H (2021) | K133Q (2022) |
| K133T (2023) | K134Q (2024) | Y135H (2025) | Y135I (2026) | P137A (2027) |
| M148V (2028) | M148I (2029) | R149H (2030) | R149Q (2031) | E159Q (2032) |
| E159H (2033) | P4S (2034) | M111V (2035) | Y89H (2036) | L3I (2037) |
| R12Q (2038) | R13Q (2039) | R22Q (2040) | R23H (2041) | R23Q (2042) |
| L30V (2043) | K31T (2044) | R33Q (2045) | K49Q (2046) | K49T (2047) |
| K70Q (2048) | K83Q (2049) | K83T (2050) | E96Q (2051) | E96H (2052) |
| P109S (2053) | L110I (2054) | R120H (2055) | R120Q (2056) | K134T (2057) |
| P137S (2058) | L161V (2059) | L161I (2060) | R162H (2061) | R162Q (2062) |
| K164Q (2063) | K164T (2064) | E165Q (2065) | E165H (2066) | |
| N45D | D94G | G102R | A139G | |
| E41H/Y89H/ | E58Q/F27V | R125H/M111V | E159H/Y89H | K121Q/P109A (2180) |
| N45D (2176) | (2177) | (2178) | (2179) | |
| K121Q/P109A/ | E78H/R33H/ | | | |
| K133Q/ | E58H/L110V | | | |
| G102R (2181) | (2182) | | | |

[0229] In addition to IFNα, protease-resistant polypeptides of this family that can be used in the oral dosage formulations include, but are not limited to, interleukin-10 (IL-10; SEQ ID NO: 809), interferon beta (IFN-β; SEQ ID NO: 147), and interferon gamma (IFN-γ; SEQ ID NO: 661) polypeptides. Exemplary protease-resistant polypeptides include one or more amino acid modifications in such polypeptides, where the one or more amino acid replacements lead to greater resistance to proteases. Such modifications include, but are not limited to, modifications shown in Tables 3-5, where the replacements are made compared to the sequence of amino acids set forth in SEQ ID NOS: 809, 147, or 661, respectively. In reference to such mutants, the first amino acid (one-letter abbreviation) corresponds to the amino acid that is replaced, the number corresponds to position in the IL-10, IFN-β or IFN-γ polypeptide sequence with reference to SEQ ID NO: 809, 147, or 661, respectively and the second amino acid (one-letter abbreviation) corresponds to the amino acid selected that replaces the first amino acid at that position. In the tables, the sequence identifier (SEQ ID NO.) for the accompanying Sequence Listing is in parenthesis next to each substitution. Such exemplary polypeptides can be used in the oral dosage formulations provided herein.

TABLE 3
Interleukin-10 (IL-10) Modifications to Increase Resistance to Proteolysis

| | | | | |
|---|---|---|---|---|
| K49N (810) | K49Q (811) | E50N (812) | E50Q (813) | E50H (814) |
| L52I (815) | L52V (816) | L53I (817) | L53V (818) | E54N (819) |
| E54Q (820) | E54H (821) | D55N (822) | D55Q (823) | F56I (824) |
| F56V (825) | K57N (826) | K57Q (827) | Y59H (828) | Y59I (829) |
| L60I (830) | L60V (831) | E67N (832) | E67Q (833) | E67H (834) |
| M68I (835) | M68V (836) | F71I (837) | F71V (838) | Y72H (839) |
| Y72I (840) | E74N (841) | E74Q (842) | E74H (843) | E75N (844) |
| E75Q (845) | E75H (846) | P78A (847) | P78S (848) | E81N (849) |
| E81Q (850) | E81H (851) | D84N (852) | D84Q (853) | P85A (854) |
| P85S (855) | D86N (856) | D86Q (857) | K88N (858) | K88Q (859) |

TABLE 4
Interferon-β (IFN- β) Modifications to Increase Resistance to Proteolysis

| | | | | |
|---|---|---|---|---|
| M1I (148) | M1V (149) | M1T (150) | M1Q (151) | M1A (152) |
| Y3H (153) | Y3I (154) | L5I (155) | L5V (156) | L5T (157) |
| L5Q (158) | L5H (159) | L5A (160) | L6I (161) | L6V (162) |
| F8I (163) | F8V (164) | L9I (165) | L9V (166) | L9T (167) |
| L9Q (168) | L9H (169) | L9A (170) | R11H (171) | R11Q (172) |
| F15I (173) | F15V (174) | K19N (175) | K19Q (176) | K19T (177) |
| K19S (178) | K19H (179) | L20I (180) | L20V (181) | L21I (182) |
| L21V (183) | W22S (184) | W22H (185) | L24I (186) | L24V (187) |
| N25H (188) | N25Q (189) | N25S (190) | R27H (191) | R27Q (192) |
| L28I (193) | L28V (194) | L28T (195) | L28Q (196) | L28H (197) |
| L28A (198) | E29N (199) | E29Q (200) | E29H (201) | Y30H (202) |
| Y30I (203) | L32I (204) | L32V (205) | L32T (206) | L32Q (207) |
| L32H (208) | L32A (209) | K33N (210) | K33Q (211) | K33T (212) |
| K33S (213) | K33H (214) | D34N (215) | D34Q (216) | R35H (217) |
| R35Q (218) | M36I (219) | M36V (220) | M36T (221) | M36Q (222) |
| M36A (223) | F38I (224) | F38V (225) | D39N (226) | D39Q (227) |
| D39H (228) | D39G (229) | P41A (230) | P41S (231) | E42N (232) |
| E42Q (233) | E42H (234) | E43N (235) | E43Q (236) | E43H (237) |
| K45N (238) | K45Q (239) | K45T (240) | K45S (241) | K45H (242) |
| L47I (243) | L47V (244) | L47T (245) | L47Q (246) | L47H (247) |
| L47A (248) | F50I (249) | F50V (250) | K52N (251) | K52Q (252) |
| K52T (253) | K52S (254) | K52H (255) | E53N (256) | E53Q (257) |
| E53H (258) | D54N (259) | D54Q (260) | L57I (261) | L57V (262) |
| Y60H (263) | Y60I (264) | E61N (265) | E61Q (266) | E61H (267) |
| M62I (268) | M62V (269) | L63I (270) | L63V (271) | F67I (272) |
| F67V (273) | F70I (274) | F70V (275) | R71H (276) | R71Q (277) |
| D73N (278) | D73Q (279) | D73H (280) | D73G (281) | W79S (282) |
| W79H (283) | E81N (284) | E81Q (285) | E81H (286) | E85N (287) |
| E85Q (288) | E85H (289) | L87I (290) | L87V (291) | L88I (292) |
| L88V (293) | Y92H (294) | Y92I (295) | L98I (296) | L98V (297) |
| K99N (298) | K99Q (299) | K99T (300) | K99S (301) | K99H (302) |
| L102I (303) | L102V (304) | E103N (305) | E103Q (306) | E103H (307) |
| E104N (308) | E104Q (309) | E104H (310) | K105N (311) | K105Q (312) |
| K105T (313) | K105S (314) | K105H (315) | L106I (316) | L106V (317) |
| E107N (318) | E107Q (319) | E107H (320) | K108N (321) | K108Q (322) |
| K108T (323) | K108S (324) | K108H (325) | E109N (326) | E109Q (327) |
| E109H (328) | D110N (329) | D110Q (330) | D110H (331) | D110G (332) |
| F111I (333) | F111V (334) | R113H (335) | R113Q (336) | K115N (337) |
| K115Q (338) | L116I (339) | L116V (340) | L116T (341) | L116Q (342) |
| L116H (343) | L116A (344) | M117I (345) | M117V (346) | L120I (347) |
| L120V (348) | L120T (349) | L120Q (350) | L120H (351) | L120A (352) |
| L122I (353) | L122V (354) | K123N (355) | K123Q (356) | K123T (357) |
| K123S (358) | K123H (359) | R124H (360) | R124Q (361) | Y125H (362) |
| Y125I (363) | Y126H (364) | Y126I (365) | R128H (366) | R128Q (367) |
| L130I (368) | L130V (369) | L130T (370) | L130Q (371) | L130H (372) |
| L130A (373) | Y132H (374) | Y132I (375) | L133I (376) | L133V (377) |
| K134N (378) | K134Q (379) | K134T (380) | K134S (381) | K134H (382) |
| K136N (383) | K136Q (384) | K136T (385) | K136S (386) | K136H (387) |
| E137N (388) | E137Q (389) | E137H (390) | Y138H (391) | Y138I (392) |
| W143S (393) | W143H (394) | R147H (395) | R147Q (396) | E149N (397) |
| E149Q (398) | E149H (399) | L151I (400) | L151V (401) | R152H (402) |
| R152Q (403) | F154I (404) | F154V (405) | Y155H (406) | Y155I (407) |
| F156I (408) | F156V (409) | R159H (410) | R159Q (411) | L160I (412) |
| L160V (413) | Y163H (414) | Y163I (415) | L164I (416) | L164V (417) |
| R165H (418) | R165Q (419) | M1D (420) | M1E (421) | M1K (422) |
| M1N (423) | M1R (424) | M1S (425) | L5D (426) | L5E (427) |
| L5K (428) | L5R (429) | L5N (430) | L5S (431) | L6D (432) |
| L6E (433) | L6K (434) | L6N (435) | L6Q (436) | L6R (437) |
| L6S (438) | L6T (439) | F8D (440) | F8E (441) | F8K (442) |
| F8R (443) | L9D (444) | L9E (445) | L9K (446) | L9N (447) |
| L9R (448) | L9S (449) | Q10D (450) | Q10E (451) | Q10K (452) |
| Q10N (453) | Q10R (454) | Q10S (455) | Q10T (456) | S12D (457) |
| S12E (458) | S12K (459) | S12R (460) | S13D (461) | S13E (462) |
| S13K (463) | S13N (464) | S13Q (465) | S13R (466) | S13T (467) |
| N14D (468) | N14E (469) | N14K (470) | N14Q (471) | N14R (472) |
| N14S (473) | N14T (474) | F15D (475) | F15E (476) | F15K (477) |
| F15R (478) | Q16D (479) | Q16E (480) | Q16K (481) | Q16N (482) |
| Q16R (483) | Q16S (484) | Q16T (485) | C17D (486) | C17E (487) |
| C17K (488) | C17N (489) | C17Q (490) | C17R (491) | C17S (492) |
| C17T (493) | L20N (494) | L20Q (495) | L20R (496) | L20S (497) |
| L20T (498) | L20D (499) | L20E (500) | L20K (501) | W22D (502) |
| W22E (503) | W22K (504) | W22R (505) | Q23D (506) | Q23E (507) |
| Q23K (508) | Q23R (509) | L24D (510) | L24E (511) | L24K (512) |
| L24R (513) | G78D (514) | G78E (515) | G78K (516) | G78R (517) |
| W79D (518) | W79E (519) | W79K (520) | W79R (521) | N80D (522) |
| N80E (523) | N80K (524) | N80R (525) | T82D (526) | T82E (527) |
| T82K (528) | T82R (529) | I83D (530) | I83E (531) | I83K (532) |
| I83R (533) | I83N (534) | I83Q (535) | I83S (536) | I83T (537) |
| N86D (538) | N86E (539) | N86K (540) | N86R (541) | N86Q (542) |
| N86S (543) | N86T (544) | L87D (545) | L87E (546) | L87K (547) |
| L87R (548) | L87N (549) | L87Q (550) | L87S (551) | L87T (552) |
| A89D (553) | A89E (554) | A89K (555) | A89R (556) | N90D (557) |
| N90E (558) | N90K (559) | N90Q (560) | N90R (561) | N90S (562) |
| N90T (563) | V91D (564) | V91E (565) | V91K (566) | V91N (567) |
| V91Q (568) | V91R (569) | V91S (570) | V91T (571) | Q94D (572) |
| Q94E (573) | Q94K (574) | Q94N (575) | Q94R (576) | Q94S (577) |
| Q94T (578) | I95D (579) | I95E (580) | I95K (581) | I95N (582) |
| I95Q (583) | I95R (584) | I95S (585) | I95T (586) | H97D (587) |
| H97E (588) | H97K (589) | H97N (590) | H97Q (591) | H97R (592) |
| H97S (593) | H97T (594) | L98D (595) | L98E (596) | L98K (597) |
| L98N (598) | L98Q (599) | L98R (600) | L98S (601) | L98T (602) |
| V101D (603) | V101E (604) | V101K (605) | V101N (606) | V101Q (607) |
| V101R (608) | V101S (609) | V101T (610) | M1C (611) | L6C (612) |
| Q10C (613) | S13C (614) | Q16C (615) | N90C (616) | V91C (617) |
| Q94C (618) | H97C (619) | L98C (620) | V101C (621) | L5D/L6E (622) |
| L5E/Q10D | L5Q/M36I | L6E/L47I (625) | L5E/K108S | L5E/L6E (627) |
| (623) | (624) | | (626) | |
| L5D/Q10D | L5N/M36I (629) | L6Q/L47I (630) | L5D/K108S | L5N/L6E (632) |
| (628) | | | (631) | |
| L5Q/Q10D | L6E/M36I (634) | L5E/N86Q | L5Q/K108S | L5Q/L6E (637) |
| (633) | | (635) | (636) | |
| L5N/Q10D | L6Q/M36I | L5D/N86Q | L5N/K108S | L5D/L6Q (642) |
| (638) | (639) | (640) | (641) | |
| L6E/Q10D | L5E/L47I (644) | L5Q/N86Q | L6E/K108S | L5E/L6Q (647) |
| (643) | | (645) | (646) | |
| L6Q/Q10D | L5D/L47I (649) | L5N/N86Q | L6Q/K108S | L5N/L6Q (652) |
| (648) | | (650) | (651) | |
| L5E/M36I (653) | L5Q/L47I (654) | L6E/N86Q | L5Q/L6Q (656) | L5D/M36I (657) |
| | | (655) | | |
| L5N/L47I (658) | L6Q/N86Q | L6E/K108S | L6H (1887) | L6A (1888) |
| | (659) | (660) | | |
| L20H (1889) | L20A (1890) | L21T (1891) | L21Q (1892) | L21H (1893) |
| L21A (1894) | L24T (1895) | L24Q (1896) | L24H (1897) | L24A (1898) |
| D34G (1899) | D54G (1900) | L57T (1901) | L57Q (1902) | L57H (1903) |
| L57A (1904) | M62T (1905) | M62Q (1906) | M62A (1907) | L63T (1908) |
| L63Q (1909) | L63H (1910) | L63A (1911) | L87H (1912) | L87A (1913) |
| L88T (1914) | L88Q (1915) | L88H (1916) | L88A (1917) | L98H (1918) |
| L98A (1919) | L102T (1920) | L102Q (1921) | L102H (1922) | L102A (1923) |
| L106T (1924) | L106Q (1925) | L106H (1926) | L106A (1927) | K115S (1928) |
| K115H (1929) | K155N (1930) | M117T (1931) | M117Q (1932) | M117A (1933) |
| L122T (1934) | L122Q (1935) | L122H (1936) | L122A (1937) | L133T (1938) |
| L133Q (1939) | L133H (1940) | L133A (1941) | L151T (1942) | L151Q (1943) |
| L151H (1944) | L151A (1945) | L160T (1946) | L160Q (1947) | L160H (1948) |
| L160A (1949) | L164T (1950) | L164Q (1951) | L164H (1952) | L164A (1953) |
| Q18H (1954) | Q18S (1955) | Q18T (1956) | Q18N (1957) | Q23H (1958) |
| Q23S (1959) | Q23T (1960) | Q23N (1961) | Q48H (1962) | Q48S (1963) |
| Q48T (1964) | Q48N (1965) | Q49H (1966) | Q49S (1967) | Q49T (1968) |
| Q49N (1969) | Q51H (1970) | Q51S (1971) | Q51T (1972) | Q51N (1973) |
| Q64H (1974) | Q64S (1975) | Q64T (1976) | Q64N (1977) | Q72H (1978) |
| Q72S (1979) | Q72T (1980) | Q72N (1981) | | |

TABLE 5
Interferon-y (IFN-y) Modifications to Increase Resistance to Proteolysis

| | | | | |
|---|---|---|---|---|
| Y2H (662) | Y2I (663) | D5N (664) | D5Q (665) | P6A (666) |
| P6S (667) | Y7H (668) | Y7I (669) | K9N (670) | K9Q (671) |
| E10N (672) | E10Q (673) | E10H (674) | E12N (675) | E12Q (676) |
| E12H (677) | L14I (678) | L14V (679) | K15N (680) | K15Q (681) |
| K16N (682) | K16Q (683) | Y17H (684) | Y17I (685) | F18I (686) |
| F18V (687) | D24N (688) | D24Q (689) | D27N (690) | D27Q (691) |
| N28Q (692) | N28S (693) | L31I (694) | L31V (695) | F32I (696) |
| F32V (697) | L33I (698) | L33V (699) | L36I (700) | L36V (701) |
| K37N (702) | K37Q (703) | W39S (704) | W39H (705) | K40N (706) |
| K40Q (707) | E41N (708) | E41Q (709) | E41H (710) | E42N (711) |
| E42Q (712) | E42H (713) | D44N (714) | D44Q (715) | R45H (716) |
| R45Q (717) | F57I (718) | F57V (719) | K58N (720) | K58Q (721) |
| L59I (722) | L59V (723) | F60I (724) | F60V (725) | K61N (726) |
| K61Q (727) | F63I (728) | F63V (729) | K64N (730) | K64Q (731) |
| D65N (732) | D65Q (733) | D66N (734) | D66Q (735) | K71N (736) |
| K71Q (737) | E74N (738) | E74Q (739) | E74H (740) | K77N (741) |
| K77Q (742) | E78N (743) | E78Q (744) | E78H (745) | D79N (746) |
| D79Q (747) | K83N (748) | K83Q (749) | F84I (750) | F84V (751) |
| K89N (752) | K89Q (753) | K90N (754) | K90Q (755) | K91N (756) |
| K91Q (757) | R92H (758) | R92Q (759) | D93N (760) | D93Q (761) |
| D94N (762) | D94Q (763) | F95I (764) | F95V (765) | E96N (766) |
| E96Q (767) | E96H (768) | K97N (769) | K97Q (770) | L98I (771) |
| L98V (772) | Y101H (773) | Y101I (774) | D105N (775) | D105Q (776) |
| L106I (777) | L106V (778) | E115N (779) | E115Q (780) | E115H (781) |
| E122N (782) | E122Q (783) | E122H (784) | L123I (785) | L123V (786) |
| P125A (787) | P125S (788) | K128N (789) | K128Q (790) | K131N (791) |
| K131Q (792) | R132H (793) | R132Q (794) | K133N (795) | K133Q (796) |
| R134H (797) | R134Q (798) | M137I (799) | M137V (800) | L138I (801) |
| L138V (802) | F139I (803) | F139V (804) | R142H (805) | R142Q (806) |
| R143H (807) | R143Q (808) | | | |

[0230] b. Long-Chain Cytokine Family

[0231] As set forth above, provided herein are oral dosage formulations containing modified cytokines that contain one or more amino acid replacements at one or more target positions in polypeptides of the long-chain cytokine family, including, but not limited to, granulocyte colony stimulating factor (G-CSF; SEQ ID NO: 47), leukemia inhibitory factor (LIF; SEQ ID NO: 1148), growth hormone (hGH; SEQ ID NO: 1260), ciliary neurotrophic factor (CNTF; SEQ ID NO: 1), teptin (SEQ ID NO: 1126), oncostatin. M (SEQ ID NO: 1181), interleukin-6 (IL-6; SEQ ID NO: 1080) and interleukin-12 (IL-12; SEQ ID NO: 860). Exemplary protease-resistant polypeptides include one or more amino acid modifications in such polypeptides, where the one or more amino acid replacements lead to greater resistance to proteases. Such modifications include, but are not limited to, modifications shown in Tables 6-13, where the replacements are made compared to the sequence of amino acids set forth in SEQ ID NOS: 47, 1148, 1260, 1, 1126, 1181, 1080, or 860, respectively. In reference to such mutants, the first amino acid (one-letter abbreviation) corresponds to the amino acid that is replaced, the number corresponds to position in the G-CSF, LIF, hGH, CNTF, leptin, oncostatin M, IL-6, or IL-12 polypeptide sequence with reference to SEQ ID NOS: 47, 1148, 1260, 1, 1126, 1181, 1080, or 860, respectively, and the second amino acid (one-letter abbreviation) corresponds to the amino acid selected that replaces the first amino acid at that position. In the tables, the sequence identifier (SEQ ID NO.) for the accompanying Sequence Listing is in parenthesis next to each substitution. Such exemplary polypeptides can be used in the oral dosage formulations provided herein.

TABLE 6
G-CSF Modifications to Increase Resistance to Proteolysis

| | | | | |
|---|---|---|---|---|
| E38N (48) | E38Q (49) | E38H (50) | E41N (51) | E41Q (52) |
| E41H (53) | E45N (54) | E45Q (55) | E45H (56) | M46I (57) |
| M46V (58) | D48N (59) | D48Q (60) | L49I (61) | L49V (62) |
| E51N (63) | E51Q (64) | E51H (65) | E60N (66) | E60Q (67) |
| E60H (68) | K63N (69) | K63Q (70) | P92A (71) | P92S (72) |
| E93N (73) | E93Q (74) | E93H (75) | F119I (76) | F119V (77) |
| D120N (78) | D120Q (79) | E123N (80) | E123Q (81) | E123H (82) |
| P124A (83) | P124S (84) | | | |

TABLE 7
Leukocyte Inhibitory Factor (LIF)
Modifications to Increase Resistance to Proteolysis

| P69A | P69S (1150) | F70I (1151) | F70V (1152) | R85H (1153) |
|---|---|---|---|---|
| (1149) | | | | |
| R85Q | R99H (1155) | R99Q (1156) | K102N (1157) | K102Q (1158) |
| (1154) | | | | |
| L104I | L104V | P106A (1161) | P106S (1162) | L109I (1163) |
| (1159) | (1160) | | | |
| L109V | Y137H | Y137I (1166) | D143N (1167) | D143Q (1168) |
| (1164) | (1165) | | | |
| Y146H | Y146I | P148A (1171) | P148S (1172) | D149N (1173) |
| (1169) | (1170) | | | |
| D149Q | K153N | K153Q (1176) | D154N (1177) | D154Q (1178) |
| (1174) | (1175) | | | |
| F156I | F156V | | | |
| (1179) | (1180) | | | |

TABLE 8
Growth Hormone (GH) Modifications to Increase Resistance to Proteolysis

| F1I/P2S | F1I/P2A | F1V/P2S | F1V/P2A | P5A (1265) |
|---|---|---|---|---|
| (1261) | (1262) | (1263) | (1264) | |
| P5S | L6I (1267) | L6V (1268) | R8H (1269) | R8Q (1270) |
| (1266) | | | | |
| L9I | L9V (1272) | F10I (1273) | F10V (1274) | D11N (1275) |
| (1271) | | | | |
| D11Q | M14I (1277) | M14V (1278) | L15I (1279) | L15V (1280) |
| (1276) | | | | |
| R16H | R16Q (1282) | R19H (1283) | R19Q (1284) | L20I (1285) |
| (1281) | | | | |
| L20V | L23I (1287) | L23V (1288) | F25I (1289) | F25V (1290) |
| (1286) | | | | |
| D26N | D26Q (1292) | Y28H (1293) | Y28I (1294) | E30N (1295) |
| (1291) | | | | |
| E30Q | E30H (1297) | F31I (1298) | F31V (1299) | E32N (1300) |
| (1296) | | | | |
| E32Q | E32H (1302) | E33N (1303) | E33Q (1304) | E33H (1305) |
| (1301) | | | | |
| Y35H | Y35I (1307) | P37A (1308) | P37S (1309) | K38N (1310) |
| (1306) | | | | |
| K38Q | E39N (1312) | E39Q (1313) | E39H (1314) | K41N (1315) |
| (1311) | | | | |
| K41Q | Y42H (1317) | Y42I (1318) | F44I (1319) | F44V (1320) |
| (1316) | | | | |
| L45I | L45V (1322) | P48A (1323) | P48S (1324) | L52I (1325) |
| (1321) | | | | |
| L52V | F54I (1327) | F54V (1328) | E56N (1329) | E56Q (1330) |
| (1326) | | | | |
| E56H | P59A (1332) | P59S (1333) | P61A (1334) | P61S (1335) |
| (1331) | | | | |
| R64H | R64Q (1337) | E65N (1338) | E65Q (1339) | E65H (1340) |
| (1336) | | | | |
| E66N | E66Q (1342) | E66H (1343) | K70N (1344) | K70Q (1345) |
| (1341) | | | | |
| L73I | L73V (1347) | E74N (1348) | E74Q (1349) | E74H (1350) |
| (1346) | | | | |
| L75I | L75V (1352) | L76I (1353) | L76V (1354) | R77H (1355) |
| (1351) | | | | |
| R77Q | L80I (1357) | L80V (1358) | L81I (1359) | L81V (1360) |
| (1356) | | | | |
| L82I | L82V (1362) | W86S (1363) | W86H (1364) | L87I (1365) |
| (1361) | | | | |
| L87V | E88N (1367) | E88Q (1368) | E88H (1369) | P89A (1370) |
| (1366) | | | | |
| P89S | F92I (1372) | F92V (1373) | L93I (1374) | L93V (1375) |
| (1371) | | | | |
| R94H | R94Q (1377) | F97I (1378) | F97V (1379) | L101I (1380) |
| (1376) | | | | |
| L101V | Y103H | Y103I (1383) | D107N (1384) | D107Q (1385) |
| (1381) | (1382) | | | |
| Y111H | Y111I | D112N (1388) | D112Q (1389) | L113I (1390) |
| (1386) | (1387) | | | |
| L113V | L114I (1392) | L114V (1393) | K115N (1394) | K115Q (1395) |
| (1391) | | | | |
| D116N | D116Q | L117I (1398) | L117V (1399) | E118N (1400) |
| (1396) | (1397) | | | |
| E118Q | E118H | E119N (1403) | E119Q (1404) | E119H (1405) |
| (1401) | (1402) | | | |
| L124I | L124V | M125I (1408) | M125V (1409) | R127H (1410) |
| (1406) | (1407) | | | |
| R127Q | L128I (1412) | L128V (1413) | E129N (1414) | E129Q (1415) |
| (1411) | | | | |
| E129H | D130N | D130Q (1418) | P133A (1419) | P133S (1420) |
| (1416) | (1417) | | | |
| R134H | R134Q | F139I (1423) | F139V (1424) | K140N (1425) |
| (1421) | (1422) | | | |
| K140Q | Y143H | Y143I (1428) | K145N (1429) | K145Q (1430) |
| (1426) | (1427) | | | |
| F146I | F146V | D147N (1433) | D147Q (1434) | D153N (1435) |
| (1431) | (1432) | | | |
| D153Q | D154N | D154Q (1438) | L156I (1439) | L156V (1440) |
| (1436) | (1437) | | | |
| L157I | L157V | K158N (1443) | K158Q (1444) | Y160H (1445) |
| (1441) | (1442) | | | |
| Y160I | L162I (1447) | L162V (1448) | L163I (1449) | L163V (1450) |
| (1446) | | | | |
| Y164H | Y164I | F166I (1453) | F166V (1454) | R167H (1455) |
| (1451) | (1452) | | | |
| R167Q | K168N | K168Q (1458) | D169N (1459) | D169Q (1460) |
| (1456) | (1457) | | | |
| M170I | M170V | D171N (1463) | D171Q (1464) | K172N (1465) |
| (1461) | (1462) | | | |
| K172Q | E174N | E174Q (1468) | E174H (1469) | F176I (1470) |
| (1466) | (1467) | | | |
| F176V | L177I (1472) | L177V (1473) | R178H (1474) | R178Q (1475) |
| (1471) | | | | |
| R183H | R183Q | E186N (1478) | E186Q (1479) | E186H (1480) |
| (1476) | (1477) | | | |
| F191I | F191V | | | |
| (1481) | (1482) | | | |

TABLE 9
Ciliary Neurotrophic Factor (CTNF)
Modifications to Increase Resistance to Proteolysis

| | | | | |
|---|---|---|---|---|
| D62N (2) | D62Q (3) | W64S (4) | W64H (5) | E66N (6) |
| E66Q (7) | E66H (8) | L67I (9) | L67V (10) | L86I (11) |
| L86V (12) | R89H (13) | R89Q (14) | E92N (15) | E92Q (16) |
| E92H (17) | P100A (18) | P100S (19) | E102N (20) | E102Q (21) |
| E102H (22) | D104N (23) | D104Q (24) | E131N (25) | E131Q (26) |
| E131H (27) | Y132H (28) | Y132I (29) | K133N (30) | K133Q (31) |
| P135A (32) | P135S (33) | R136H (34) | R136Q (35) | E138N (36) |
| E138Q (37) | E138H (38) | D140N (39) | D140Q (40) | P143A (41) |
| P143S (42) | D148N (43) | D148Q (44) | L151I (45) | L151V (46) |

TABLE 10
Leptin Modifications to Increase Resistance to Proteolysis

| P43A | P43S (1128) | L49I (1129) | L49V (1130) | P99A (1131) |
|---|---|---|---|---|
| (1127) | | | | |
| P99S | W100S | W100H (1134) | L104I (1135) | L104V (1136) |
| (1132) | (1133) | | | |
| E105N | E105Q | E105H (1139) | L107I (1140) | L107V (1141) |
| (1137) | (1138) | | | |
| D108N | D108Q | D141N (1144) | D141Q (1145) | L142I (1146) |
| (1142) | (1143) | | | |
| L142V | | | | |
| (1147) | | | | |

TABLE 11
Oncostatin M Modifications to Increase Resistance to Proteolysis

| E59N (1182) | E59Q (1183) | E59H (1184) | E60N (1185) | E60Q (1186) |
|---|---|---|---|---|
| E60H (1187) | R63H (1188) | R63Q (1189) | L65I (1190) | L65V (1191) |
| R84H (1192) | R84Q (1193) | D87N (1194) | D87Q (1195) | E89N (1196) |
| E89Q (1197) | E89H (1198) | R91H (1199) | R91Q (1200) | K94N (1201) |
| K94Q (1202) | D97N (1203) | D97Q (1204) | E99N (1205) | E99Q (1206) |
| E99H (1207) | R100H | R100Q | L103I (1210) | L103V (1211) |
| | (1208) | (1209) | | |
| E106N | E106Q | E106H | | |
| (1212) | (1213) | (1214) | | |

TABLE 12
Interleukin-6 (IL-6) Modifications to Increase Resistance to Proteolysis

| P64A | P64S (1082) | K65N (1083) | K65Q (1084) | M66I (1085) |
|---|---|---|---|---|
| (1081) | | | | |
| M66V | E68N (1087) | E68Q (1088) | E68H (1089) | K69N (1090) |
| (1086) | | | | |
| K69Q | F73I (1092) | F73V (1093) | F77I (1094) | F77V (1095) |
| (1091) | | | | |
| E92N | E92Q (1097) | E92H (1098) | E98N (1099) | E98Q (1100) |
| (1096) | | | | |
| E98H | R103H | R103Q (1103) | E105N (1104) | E105Q (1105) |
| (1101) | (1102) | | | |
| E105H | E108N | E108Q (1108) | E108H (1109) | D133N (1110) |
| (1106) | (1107) | | | |
| D133Q | P138A | P138S (1113) | D139N (1114) | D139Q (1115) |
| (1111) | (1112) | | | |
| P140A | P140S | K149N (1118) | K149Q (1119) | W156S (1120) |
| (1116) | (1117) | | | |
| W156H | R178H | R178Q (1123) | R181H (1124) | R181Q (1125) |
| (1121) | (1122) | | | |

TABLE 13
Interleukin-12 (IL-12) Modifications to Increase Resistance to Proteolysis

| K56N | K56Q | E61N | E61Q | E61H | L66I | L66V | E67N |
|---|---|---|---|---|---|---|---|
| (861) | (862) | (863) | (864) | (865) | (866) | (867) | (868) |
| E67Q | E67H | L68I | L68V | K70N | K70Q | E72N | E72Q |
| (869) | (870) | (871) | (872) | (873) | (874) | (875) | (876) |
| E72H | L75I | L75V | R78H | R78Q | E79N | E79Q | E79H |
| (877) | (878) | (879) | (880) | (881) | (882) | (883) | (884) |
| F82I | F82V | L89I | L89V | R92H | R92Q | K93N | K93Q |
| (885) | (886) | (887) | (888) | (889) | (890) | (891) | (892) |
| E107N | E107Q | E107H | K110N | K110Q | M111I | M111V | E115N |
| (893) | (894) | (895) | (896) | (897) | (898) | (899) | (900) |
| E115Q | E115H | K117N | K117Q | L124I | L124V | M125I | M125V |
| (901) | (902) | (903) | (904) | (905) | (906) | (907) | (908) |
| P127A | P127S | K128N | K128Q | R129H | R129Q | R189H | R189Q |
| (909) | (910) | (911) | (912) | (913) | (914) | (915) | (916) |

[0232] c. Short-Chain Cytokine Family

[0233] As set forth above, provided herein are oral dosage formulations containing modified cytokines that contain one or more amino acid replacements at one or more target positions in polypeptides of the short-chain cytokine protein family, including, but not limited to, erythropoietin (EPO; SEQ ID NO: 1886), granulocyte-macrophage colony stimulating factor (GM-CSF; SEQ ID NO: 85), interleukin-2 (IL-2; SEQ ID NO: 946), interleukin-3 (IL-3; SEQ ID NO: 995), interleukin-4 (IL-4; SEQ ID NO: 1018), interleukin-5 (IL-5; SEQ ID NO: 1044), interleukin-13 (IL-13; SEQ ID NO: 917), Flt3 ligand (SEQ ID NO: 118) and stem cell factor (SCF; SEQ ID NO: 1215). Exemplary protease-resistant polypeptides include one or more amino acid modifications in such polypeptides, where the one or more amino acid replacements lead to greater resistance to proteases. Such modifications include, but are not limited to, modifications shown in Tables 14-22, where the replacements are made compared to the sequence of amino acids set forth in SEQ ID NOS: 1886, 85, 946, 995, 1018, 1044, 917, 118, or 1215, respectively. In reference to such mutants, the first amino acid (one-letter abbreviation) corresponds to the amino acid that is replaced, the number corresponds to position in the EPO, GM-CSF, IL-2, IL-3, IL-4, IL-5, IL-13, Flt3 ligand, or SCF polypeptide sequence with reference to SEQ ID NOS: 1886, 85, 946, 995, 1018, 1044, 917, 118, or 1215, respectively, and the second amino acid (one-letter abbreviation) corresponds to the amino acid selected that replaces the first amino acid at that position. In the tables, the sequence identifier (SEQ ID NO.) for the accompanying Sequence Listing is in parenthesis next to each substitution. Such exemplary polypeptides can be used in the oral dosage formulations provided herein.

TABLE 14
Erythropoietin (EPO) Modifications to Increase Resistance to Proteolysis

| P2S | P2A (1484) | P3S (1485) | P3A (1486) | R4H (1487) |
|---|---|---|---|---|
| (1483) | | | | |
| R4Q | L5I (1489) | L5V (1490) | C7S (1491) | C7V (1492) |
| (1488) | | | | |
| C7A | C7I (1494) | C7T (1495) | D8Q (1496) | D8H (1497) |
| (1493) | | | | |
| D8N | R10H (1499) | R10Q (1500) | L12V (1501) | L12I (1502) |
| (1498) | | | | |
| E13Q | E13H (1504) | E13N (1505) | R14H (1506) | R14Q (1507) |
| (1503) | | | | |
| Y15H | Y15I (1509) | Y15K (1510) | Y15R (1511) | L16I (1512) |
| (1508) | | | | |
| L16V | L16E (1514) | L16D (1515) | L16K (1516) | L16R (1517) |
| (1513) | | | | |
| L17I | L17V (1519) | L17E (1520) | L17D (1521) | L17K (1522) |
| (1518) | | | | |
| L17R | E18Q (1524) | E18H (1525) | E18N (1526) | E18K (1527) |
| (1523) | | | | |
| E18R | K20Q (1529) | K20T (1530) | K20N (1531) | E21Q (1532) |
| (1528) | | | | |
| E21H | E21N (1534) | E21K (1535) | E21R (1536) | E23Q (1537) |
| (1533) | | | | |
| E23H | E23N (1539) | E23K (1540) | E23R (1541) | I25K (1542) |
| (1538) | | | | |
| I25R | T26E (1544) | T26D (1545) | T26K (1546) | T26R (1547) |
| (1543) | | | | |
| T27E | T27D (1549) | T27K (1550) | T27R (1551) | G28E (1552) |
| (1548) | | | | |
| G28D | G28K (1554) | G28R (1555) | C29S (1556) | C29V (1557) |
| (1553) | | | | |
| C29A | C29I (1559) | C29T (1560) | C29K (1561) | C29R (1562) |
| (1558) | | | | |
| A30E | A30D (1564) | A30K (1565) | A30R (1566) | E31Q (1567) |
| (1563) | | | | |
| E31H | E31N (1569) | H32K (1570) | H32R (1571) | C33K (1572) |
| (1568) | | | | |
| C33R | S34K (1574) | S34R (1575) | L35V (1576) | L35K (1577) |
| (1573) | | | | |
| L35R | L35I (1579) | N36E (1580) | N36D (1581) | N36K (1582) |
| (1578) | | | | |
| N36R | E37Q (1584) | E37H (1585) | E37N (1586) | E37K (1587) |
| (1583) | | | | |
| E37R | I39K (1589) | I39R (1590) | T40E (1591) | T40D (1592) |
| (1588) | | | | |
| T40K | T40R (1594) | P42S (1595) | P42A (1596) | P42K (1597) |
| (1593) | | | | |
| P42R | D43Q (1599) | D43H (1600) | D43N (1601) | K45Q (1602) |
| (1598) | | | | |
| K45T | K45N (1604) | F48I (1605) | F48V (1606) | Y49H (1607) |
| (1603) | | | | |
| Y49I | W51S | W51H (1610) | K52Q (1611) | K52T (1612) |
| (1608) | (1609) | | | |
| K52N | R53H (1614) | R53Q (1615) | M54V (1616) | M54I (1617) |
| (1613) | | | | |
| E55Q | E55H (1619) | E55N (1620) | V61K (1621) | V61R (1622) |
| (1618) | | | | |
| E62Q | E62H (1624) | E62N (1625) | E62K (1626) | E62R (1627) |
| (1623) | | | | |
| W64S | W64H | W64K (1630) | W64R (1631) | Q65K (1632) |
| (1628) | (1629) | | | |
| Q65R | L67I (1634) | L67V (1635) | A68K (1636) | A68R (1637) |
| (1633) | | | | |
| L69V | L69I (1639) | L69K (1640) | L69R (1641) | L70I (1642) |
| (1638) | | | | |
| L70V | S71K (1644) | S71R (1645) | E72Q (1646) | E72H (1647) |
| (1643) | | | | |
| E72N | E72K (1649) | E72R (1650) | V74K (1651) | V74R (1652) |
| (1648) | | | | |
| L75V | L75I (1654) | L75E (1655) | L75D (1656) | L75K (1657) |
| (1653) | | | | |
| L75R | R76H (1659) | R76Q (1660) | Q78E (1661) | Q78D (1662) |
| (1658) | | | | |
| Q78K | Q78R (1664) | A79K (1665) | A79R (1666) | L80V (1667) |
| (1663) | | | | |
| L80I | L80K (1669) | L80R (1670) | L81I (1671) | L81V (1672) |
| (1668) | | | | |
| V82E | V82D (1674) | V82K (1675) | V82R (1676) | S84E (1677) |
| (1673) | | | | |
| S84D | S84K (1679) | S84R (1680) | S85D (1681) | S85K (1682) |
| (1678) | | | | |
| S85R | Q86E (1684) | Q86D (1685) | Q86K (1686) | Q86R (1687) |
| (1683) | | | | |
| P87S | P87A (1689) | P87K (1690) | P87R (1691) | W88S (1692) |
| (1688) | | | | |
| W88H | W88E | W88D (1695) | W88K (1696) | W88R (1697) |
| (1693) | (1694) | | | |
| E89Q | E89H (1699) | E89N (1700) | E89K (1701) | E89R (1702) |
| (1698) | | | | |
| P90S | P90A (1704) | P90K (1705) | P90R (1706) | L91I (1707) |
| (1703) | | | | |
| L91V | L91K (1709) | L91R (1710) | Q92E (1711) | Q92D (1712) |
| (1708) | | | | |
| Q92K | Q92R (1714) | L93V (1715) | L93I (1716) | L93E (1717) |
| (1713) | | | | |
| L93D | L93K (1719) | L93R (1720) | H94K (1721) | H94R (1722) |
| (1718) | | | | |
| V95K | V95R (1724) | D96Q (1725) | D96H (1726) | D96N (1727) |
| (1723) | | | | |
| K97Q | K97T (1729) | K97N (1730) | L102V (1731) | L102I (1732) |
| (1728) | | | | |
| R103H | R103Q | L105I (1735) | L105V (1736) | L108I (1737) |
| (1733) | (1734) | | | |
| L108V | L109I (1739) | L109V (1740) | R110H (1741) | R110Q (1742) |
| (1738) | | | | |
| L112V | L112I (1744) | K116Q (1745) | K116T (1746) | K116N (1747) |
| (1743) | | | | |
| E117Q | E117H | E117N (1750) | A118E (1751) | A118D (1752) |
| (1748) | (1749) | | | |
| A118K | A118R | I119E (1755) | I119D (1756) | I119K (1757) |
| (1753) | (1754) | | | |
| I119R | S120E | S120D (1760) | S120K (1761) | S120R (1762) |
| (1758) | (1759) | | | |
| P121S | P121A | P121E (1765) | P121D (1766) | P121K (1767) |
| (1763) | (1764) | | | |
| P121R | P122S | P122A (1770) | P122E (1771) | P122D (1772) |
| (1768) | (1769) | | | |
| P122K | P122R | D123Q (1775) | D123H (1776) | D123N (1777) |
| (1773) | (1774) | | | |
| D123E | D123K | D123R (1780) | A124E (1781) | A124D (1782) |
| (1778) | (1779) | | | |
| A124K | A124R | A125E (1785) | A125D (1786) | A125K (1787) |
| (1783) | (1784) | | | |
| A125R | S126E | S126D (1790) | S126K (1791) | S126R (1792) |
| (1788) | (1789) | | | |
| A127E | A127D | A127K (1795) | A127R (1796) | A128E (1797) |
| (1793) | (1794) | | | |
| A128D | A128K | A128R (1800) | P129S (1801) | P129A (1802) |
| (1798) | (1799) | | | |
| P129K | P129R | P129E (1805) | P129D (1806) | L130V (1807) |
| (1803) | (1804) | | | |
| L130I | L130K | L130R (1810) | L130E (1811) | L130D (1812) |
| (1808) | (1809) | | | |
| R131H | R131Q | T132K (1815) | T132R (1816) | I133K (1817) |
| (1813) | (1814) | | | |
| I133R | I133E | I133D (1820) | T134K (1821) | T134R (1822) |
| (1818) | (1819) | | | |
| T134E | T134D | D136Q (1825) | D136H (1826) | D136K (1827) |
| (1823) | (1824) | | | |
| D136R | T137K | T137R (1830) | T137E (1831) | T137D (1832) |
| (1828) | (1829) | | | |
| F138I | F138V | R139H (1835) | R139Q (1836) | K140N (1837) |
| (1833) | (1834) | | | |
| K140Q | L141I (1839) | L141V (1840) | L141K (1841) | L141R (1842) |
| (1838) | | | | |
| F142I | F142V | F142K (1845) | F142R (1846) | R143H (1847) |
| (1843) | (1844) | | | |
| D136N | R143Q | V144K (1850) | V144R (1851) | Y145H (1852) |
| (1848) | (1849) | | | |
| Y145I | Y145K | Y145R (1855) | S146K (1856) | S146R (1857) |
| (1853) | (1854) | | | |
| F148I | F148V | L149I (1860) | L149V (1861) | R150H (1862) |
| (1858) | (1859) | | | |
| R150Q | K152Q | K152T (1865) | K152N (1866) | L153I (1867) |
| (1863) | (1864) | | | |
| L153V | K154Q | K154T (1870) | K154N (1871) | L155V (1872) |
| (1868) | (1869) | | | |
| L155I | Y156H | Y156I (1875) | E159Q (1876) | E159H (1877) |
| (1873) | (1874) | | | |
| E159N | R162H | R162Q (1880) | D165N (1881) | D165Q (1882) |
| (1878) | (1879) | | | |
| D165H | R166H | R166Q (1885) | | |
| (1883) | (1884) | | | |

TABLE 15
GM-CSF Modifications to Increase Resistance to Proteolysis

| | | | | |
|---|---|---|---|---|
| W61S (86) | W61H (87) | P63A (88) | P63S (89) | P68A (90) |
| P68S (91) | L72I (92) | L72V (93) | F86I (94) | F86V (95) |
| E96N (96) | E96Q (97) | E96H (98) | P100A (99) | P100S (100) |
| E101N (101) | E101Q (102) | E101H (103) | P131A (104) | P131S (105) |
| L133I (106) | L133V (107) | P135A (108) | P135S (109) | F147I (110) |
| F147V (111) | R169H (112) | R169Q (113) | R172H (114) | R172Q (115) |
| P177A (116) | P177S (117) | | | |

TABLE 16
Interleukin-2 (IL-2) Modifications to Increase Resistance to Proteolysis

| | | | | |
|---|---|---|---|---|
| K43N (947) | K43Q (948) | Y45H (949) | Y45I (950) | K48N (951) |
| K48Q (952) | K49N (953) | K49Q (954) | E52N (955) | E52Q (956) |
| E52H (957) | L53I (958) | L53V (959) | E60N (960) | E60Q (961) |
| E60H (962) | E61N (963) | E61Q (964) | E61H (965) | P65A (966) |
| P65S (967) | E67N (968) | E67Q (969) | E67H (970) | E68N (971) |
| E68Q (972) | E68H (973) | L72I (974) | L72V (975) | E100N (976) |
| E100Q (977) | E100H (978) | F103I (979) | F103V (980) | M104I (981) |
| M104V (982) | E106N (983) | E106Q (984) | E106H (985) | Y107H (986) |
| Y107I (987) | D109N (988) | D109Q (989) | E110N (990) | E110Q (991) |
| E110H (992) | L132I (993) | L132V (994) | | |

TABLE 17
Interleukin-3 (IL-3) Modifications to Increase Resistance to Proteolysis

| F37I (996) | F37V (997) | E43N (998) | E43Q (999) | E43H (1000) |
|---|---|---|---|---|
| D46N (1001) | D46Q (1002) | E59N (1003) | E59Q (1004) | E59H (1005) |
| R63H (1006) | R63Q (1007) | K66N (1008) | K66Q (1009) | P96A (1010) |
| P96S | K100N | K100Q | D101N | D101Q |
| (1011) | (1012) | (1013) | (1014) | (1015) |
| D103N (1016) | D103Q | | | |
| | (1017) | | | |

TABLE 18
Interleukin-4 (IL-4) Modifications to Increase Resistance to Proteolysis

| E26N (1019) | E26Q (1020) | E26H (1021) | K37N (1022) | K37Q |
|---|---|---|---|---|
| | | | | (1023) |
| R53H (1024) | R53Q (1025) | E60N (1026) | E60Q (1027) | E60H |
| | | | | (1028) |
| K61N (1029) | K61Q (1030) | R64H (1031) | R64Q (1032) | L66I |
| | | | | (1033) |
| L66V (1034) | P100A (1035) | P100S (1036) | K102N | K102Q |
| | | | (1037) | (1038) |
| E103N (1039) | E103Q (1040) | E103H (1041) | K126N | K126Q |
| | | | (1042) | (1043) |

TABLE 19
Interleukin-5 (IL-5) Modifications to Increase Resistance to Proteolysis

| R32H (1045) | R32Q (1046) | P34A (1047) | P34S (1048) | K39N |
|---|---|---|---|---|
| | | | | (1049) |
| K39Q (1050) | E46N (1051) | E46Q (1052) | E46H (1053) | E47N |
| | | | | (1054) |
| E47Q (1055) | E47H (1056) | E56N (1057) | E56Q (1058) | E56H |
| | | | | (1059) |
| K84N (1060) | K84Q (1061) | K85N (1062) | K85Q (1063) | E88N |
| | | | | (1064) |
| E88Q (1065) | E88H (1066) | E89N (1067) | E89Q (1068) | E89H |
| | | | | (1069) |
| R90H (1070) | R90Q (1071) | E102N (1072) | E102Q | E102H |
| | | | (1073) | (1074) |
| E110N (1075) | E110Q (1076) | E110H (1077) | W111S | W111H |
| | | | (1078) | (1079) |

TABLE 20
Interleukin-13 (IL-13) Modifications to Increase Resistance to Proteolysis

| | | | | |
|---|---|---|---|---|
| M32I (918) | M32V (919) | W34S (920) | W34H (921) | L38I (922) |
| L38V (923) | E48N (924) | E48Q (925) | E48H (926) | F79I (927) |
| F79V (928) | L82I (929) | L82V (930) | R85H (931) | R85Q (932) |
| D86N (933) | D86Q (934) | K88N (935) | K88Q (936) | R107H (937) |
| R107Q (938) | E108N (939) | E108Q (940) | E108H (941) | R110H (942) |
| R110Q (943) | F111I (944) | F111V (945) | | |

TABLE 21
Flt 3 Ligand Modifications to Increase Resistance to Proteolysis

| | | | | |
|---|---|---|---|---|
| D3N (119) | D3Q (120) | D40N (121) | D40Q (122) | E42N (123) |
| E42Q (124) | E42H (125) | L43I (126) | L43V (127) | R55H (128) |
| R55Q (129) | E58N (130) | E58Q (131) | E58H (132) | R59H (133) |
| R59Q (134) | K61N (135) | K61Q (136) | P89A (137) | P89S (138) |
| P90A (139) | P90S (140) | P91A (141) | P91S (142) | R95H (143) |
| R95Q (144) | F96I (145) | F96V (146) | | |

TABLE 22
Stem Cell Factor (SCF) Modifications to Increase Resistance to
Proteolysis

| M27I (1216) | M27V (1217) | K31N (1218) | K31Q (1219) | P34A |
|---|---|---|---|---|
| | | | | (1220) |
| P34S (1221) | D37N (1222) | D37Q (1223) | D54N (1224) | D54Q |
| | | | | (1225) |
| D58N (1226) | D58Q (1227) | D61N (1228) | D61Q (1229) | K62N |
| | | | | (1230) |
| K62Q (1231) | F63I (1232) | F63V (1233) | K96N (1234) | K96Q |
| | | | | (1235) |
| L98I (1236) | L98V (1237) | K99N (1238) | K99Q (1239) | K100N |
| | | | | (1240) |
| K100Q (1241) | F102I (1242) | F102V (1243) | K103N | K103Q |
| | | | (1244) | (1245) |
| E106N (1246) | E106Q (1247) | E106H (1248) | P107A | P107S |
| | | | (1249) | (1250) |
| R108H (1251) | R108Q (1252) | L109I (1253) | L109V | E134N |
| | | | (1254) | (1255) |
| E134Q (1256) | E134H (1257) | D137N (1258) | D137Q | |
| | | | (1259) | |

[0234] 3. Other Exemplary Polypeptides

[0235] Additional protease-resistant polypeptides of the proteins exemplified below can be used in the oral dosage formulations provided herein. Protease resistant polypeptides can be produced by modifying therapeutic proteins using any method known in the art to generate, including, but not limited to, the methods described in US Pat. Pub. Nos. US 2004/0132977 and US 2005/0202438. Exemplary of these polypeptides that can be modified for protease resistance for use in the oral dosage formulations provided are proteins of pharmacologic and/or therapeutic interest, such as those described above. Oral dosage formulations of protease-resistant polypeptides provided herein can include protease-resistant polypeptides that belong to families of therapeutic polypeptides including, but not limited to, blood factors, insulin, relaxin, antibodies, growth factors, soluble receptors, chemokines, angiogenic agents, and neuroactive peptides some of which also include polypeptides already mentioned above. The modified cytokines for use in the oral dosage formulations provided include allelic and species variants of such polypeptides containing corresponding modifications for protease resistance.

[0236] a. Blood Factors

[0237] Oral dosage formulations of protease-resistant polypeptides provided herein can include a protease-resistant polypeptide that is a blood factor. Exemplary of blood factors include, but are not limited to, tissue plasminogen activator (tPA) (GenBank Accession No. P00750; SEQ ID NO: 2122), Factor VII (GenBank Accession No. P08709; SEQ ID NO: 2123), Factor VIII (GenBank Accession No. P00451; SEQ ID NO: 2124), Factor IX (GenBank Accession No. P00740; SEQ ID NO: 2125), β-globin (GenBank Accession No. P68871; SEQ ID NO: 2126), and hemoglobin. Blood factor polypeptides can be modified using any method known in the art to generate a protease-resistant polypeptide, including, but not limited to, the methods described in US Pat. Pub. Nos. US 2004/0132977 and US 2005/0202438. Such protease-resistant blood factor polypeptides can be prepared as an oral dosage formulation using the methods provided herein.

[0238] b. Insulin

[0239] Oral dosage formulations of protease-resistant polypeptides can include a protease-resistant polypeptide that is an insulin. Exemplary of insulins include, but are not limited to, human insulin (GenBank Accession No. P01308; SEQ ID NO: 2127) and the preproinsulin, proinsulin and the insulin forms disclosed in U.S. Pat. Nos. 4,992,417; 4,992,418; 5,474,978, 5,514,646, 5,504,188, 5,547,929, 5,650,486, 5,693,609, 5,700,662, 5,747,642, 5,922,675, 5,952,297, 6,034,054, and 6,211,144, and published PCT applications WO 00/121197; WO 09/010,645; and WO 90/12814. Insulin polypeptides also include insulin derivatives and analogs, including, but not limited to, superactive insulin analogs, monomeric insulins, and hepatospecific insulin analogs. Various forms of insulin analogs include, but are not limited to, insulin lispro (Humalog®), insulin lispro mixed with insulin lispro protamine (sold as Humalog® 50/50™, Humalog®75/25™), insulin isophane (sold as Humulin®, Humulin® N, Humulin®N Pen, NPH Iletin® II Pork, Insulin Purified NPH Pork, Novolin® N, Novolin® N Innolet, Novolin® N PenFill), insuline regular (sold as Humulin® R, Iletin® II Regular Pork, Insulin Purified Regular Pork, Novolin® R, Velosulin® BR), insulin isophane mixed with insulin regular (sold as Humulin®50/50™, Humulin®70/30™, Humulin® 70/30Pen™, Novolin® 70/30, Novolin® 70/30 Innolet), insulin zinc (sold as Lente®, Humulin® L, Iletin® Lente, Insulin Lente Pork, Novolin® L) and insulin glargine (Lantus®).

[0240] The insulin polypeptides used to generate protease-resistant polypeptides for use in the methods herein can include amino acid substitutions at one or more amino acid positions in the B-chain of insulin (set forth in SEQ ID NO: 2128, which corresponds to amino acid positions 25-54 in SEQ ID NO:2127), or can be glycosylated or acylated. For example, an insulin polypeptide can be is derivatized with a C6-C2 fatty acid (e.g., myristic, pentadecylic, palmitic, heptadecylic, or stearic acid) at an α- or ε-amino group of a glycine, phenylalanine, or lysine residue (U.S. Pat. No. 5,922,675). Exemplary human insulin analogs and derivatives include, but are not limited to, insulin polypeptides wherein the amino acid in position 28 of the B-chain (i.e. B28, corresponding to amino acid position 28 of the sequence set forth in SEQ ID NO:2128) is Asp, Lys, Leu, Val or Ala and the amino acid residue in position 29 of the B-chain (i.e. B29) is Lys or Pro; insulin polypeptides in which amino acid position B28 is Asp and position B29 is Lys or Pro; insulin polypeptides in which position B28 is Lys, and position B29 is Lys or Pro; insulin polypeptides in which position B28 is Asp (i.e. Asp^{B28}); des(B26-B30) human insulin; des(B28-B30) human insulin; des(B27) human insulin; des(B30) human insulin; insulin polypeptides containing Lys^{B28} and Pro^{B29}; B29-N^{ε}-myristoyl-des(B30) human insulin; B29-N^{ε}-palmitoyl-des(B30) human insulin; B29-N^{ε}-myristoyl human insulin; B29-N^{ε}-palmitoyl human insulin; B28-N^{ε}-myristoyl Lys^{B28} Pro^{B29} human insulin; B28-N N^{ε}-palmitoyl Lys^{B28} Pro^{B29} human insulin; B30-N^{ε}-myristoyl-Thr^{B29} Lys^{B30} human insulin; B30-N^{ε}-palmitoyl-Thr^{B29} Lys^{B30} human insulin; B29-N^{ε}-(N-palmitoyl-glutamyl)-des(B30) human insulin; B29-N^{ε}-(N-lithocholyl-glutamyl)-des(B30) human insulin; B29-N^{ε}-(-carboxyheptadecanoyl)-des(B30) human insulin; and B29-N^{ε}-(G-carboxyheptadecanoyl) human insulin.

[0241] Insulin polypeptides, including insulin variants, analogs and derivatives, can be modified using any method known in the art to generate a protease-resistant polypeptide, including, but not limited to, the methods described in US Pat. Pub. Nos. US 2004/0132977 and US 2005/0202438. Such protease-resistant insulin polypeptides can be prepared as an oral dosage formulation using the methods provided herein.

[0242] c. Relaxin

[0243] Oral dosage formulations of protease-resistant polypeptides provided herein can include a protease-resistant polypeptide that is a relaxin. The relaxin polypeptide can be a naturally-occurring relaxin or a synthetic relaxin. Naturally-occurring relaxin can be of human, murine (i.e., rat or mouse), porcine or other mammalian species origin. Human relaxin polypeptides include, but are not limited to, H1 relaxin (GenBank Accession No. P01137; SEQ ID NO: 2155), H2 relaxin (GenBank Accession No. P01137; SEQ ID NO: 2156), H3 relaxin (GenBank Accession No. P01137; SEQ ID NO: 2157), and recombinant human relaxin (rhRLX). Relaxin polypeptides include, but are not limited to, preprorelaxin polypeptides, which are the precursor polypeptides and contain a signal sequence; prorelaxin polypeptides, in which the signal sequence has been removed and the B and A chains are linked by the connecting (C) chain; and the mature relaxin polypeptide, in which the C-chain has been cleaved and the A and B chains are connected by disulphide bonds. The relaxin polypeptides also can contain A and B chains having N- and/or C-terminal truncations. For example, in H2 relaxin, the A chain can be varied from containing amino acids A1-A24 to A10-A24 (corresponding to amino acid positions 162-185 and 171-185, respectively, of the sequence set forth in SEQ ID NO:2156), and the B chain can be varied from containing amino acids B-1-B33 to B10-B22 (corresponding to amino acid positions 25-58 and 35-47, respectively, of the sequence set forth in SEQ ID NO:2156); and in H1 relaxin, the A chain can be varied from containing amino acids A1-A24 to A10-A24 (corresponding to amino acid positions 162-185 and 171-185, respectively, of the sequence set forth in SEQ ID NO:2155) and the B chain can be varied from containing amino acids B1-32 to B10-22 (corresponding to amino acid positions 26-57 and 35-47, respectively, of the sequence set forth in SEQ ID NO:2155) (see e.g., U.S. Pat. No. 5,179,195).

[0244] Relaxin polypeptides that can be modified to be protease-resistant for use in the methods provided herein include relaxin analogs and variants including, but not limited to, relaxin polypeptides disclosed in U.S. Pat. No. 5,811,395, and U.S. Pat. No. 6,200,953. Other relaxins include those formulated as described in U.S. Pat. No. 5,945,402. Relaxin analogs and variants can include polypeptides having a replacement of one or more amino acids in the B and/or A chains with a different amino acid, including a D-form of a natural amino-acid. For example, the relaxin polypeptide can contain a substitution of the methionine at B24 (corresponding to amino acid position 49 of the sequences set forth in SEQ ID NOS:2155-2157) with norleucine (Nle), valine (Val), alanine (Ala), glycine (Gly), serine (Ser), or homoserine (Homo Ser). Other relaxin polypeptides can include amino acid substitutions at the B/C and C/A junctions of prorelaxin, or can contain a non-naturally occurring C peptide, such as described in U.S. Pat. No. 5,759,807.

[0245] Relaxin polypeptides can be modified using any method known in the art to generate a protease-resistant polypeptide, including, but not limited to, the methods described in US Pat. Pub. Nos. US 2004/0132977 and US 2005/0202438. Such relaxin growth factor polypeptides can be prepared as an oral dosage formulation using the methods provided herein.

[0246] d. Antibodies

[0247] Oral dosage formulations of protease-resistant polypeptides can include a protease-resistant polypeptide that is an antibody. Exemplary of antibodies include, but are not limited to, antibodies of various isotypes (e.g., IgG1, IgG3 and IgG4), monoclonal antibodies produced by any method known in the art, humanized antibodies, chimeric antibodies, single-chain antibodies, antibody fragments such as Fv, F(ab′) 2, Fab′, Fab and Facb, and any antibody or fragment thereof that is capable of binding an antigen. Exemplary antibodies include antibodies that are specific for a cell surface receptor and that function as antagonists to the receptor, including, but not limited to, antibodies to transforming growth factor (TGF)-β receptor, antibodies to tumor necrosis factor (TNF)-α receptor, antibodies to vascular endothelial growth factor (VEGF) receptor (see, e.g., U.S. Pat. Nos. 6,617,160, 6,448,077, and 6,365,157) and antibodies to epidermal growth factor receptor; antibodies specific for receptor ligands, including, but not limited to, antibodies to TGF-β, antibodies to TNF-α, and antibodies to VEGF; antibodies specific for a tumor-associated antigen; antibodies specific for CD20; antibodies specific for epidermal growth factor receptor-2; antibodies specific for the receptor binding domain of IgE; antibodies specific for adhesion molecules, such as the α subunit (CD11a) of LFA-1 and antibodies specific for α4β7. Antibody polypeptides can be modified using any method known in the art to generate a protease-resistant polypeptide, including, but not limited to, the methods described in US Pat. Pub. Nos. US 2004/0132977 and US 2005/0202438. Such protease-resistant antibody polypeptides can be prepared as an oral dosage formulation using the methods provided herein.

[0248] e. Growth Factors

[0249] Oral dosage formulations of protease-resistant polypeptides can include a protease-resistant polypeptide that is a growth factors. Exemplary of growth factors include, but are not limited to, keratinocyte growth factor (GenBank Accession No. P21781; SEQ ID NO: 2129), acidic fibroblast growth factor (GenBank Accession No. P05230; SEQ ID NO: 2130), stem cell factor (GenBank Accession No. P21583; SEQ ID NO: 2131), basic fibroblast growth factor (GenBank Accession No. P09038; SEQ ID NO: 2132), hepatocyte growth factor (GenBank Accession No. P14210; SEQ ID NO: 2133), insulin-like growth factor 1A (GenBank Accession No. P01343; SEQ ID NO: 2134), insulin-like growth factor 1B (GenBank Accession No. P05019; SEQ ID NO: 2135), and any fragments thereof. Also contemplated are fusion proteins containing a growth factor or fragment thereof. Growth factor polypeptides can be modified using any method known in the art to generate a protease-resistant polypeptide, including, but not limited to, the methods described in US Pat. Pub. Nos. US 2004/0132977 and US 2005/0202438. Such protease-resistant growth factor polypeptides can be prepared as an oral dosage formulation using the methods provided herein.

[0250] f. Soluble Receptors

[0251] Oral dosage formulations of protease-resistant polypeptides can include a protease-resistant polypeptide that is a soluble receptor. Exemplary of soluble receptors include, but are not limited to, a TNF-α-binding soluble receptor, a soluble VEGF receptor, soluble interleukin receptor, soluble IL-1 receptor, a soluble type II IL-1 receptor, a soluble γδT cell receptor, soluble EGFR or other ErbB receptor and any active portion, such as ligand-binding fragment, of a soluble receptor. Soluble receptors bind a ligand that, under normal physiological conditions, binds to a membrane-bound or cell surface receptor which can lead to various activation and/or signaling events. Thus, a soluble receptor is one that can function as a receptor antagonist, by binding the ligand and preventing activation and/or signaling via the membrane-bound or cell surface receptor.

[0252] The amino acid sequences of various soluble receptors are known in the art and can be used to generate protease-resistant polypeptides for use in the methods provided herein. For example, amino acid sequences of soluble VEGF receptors are known in the databases (GenBank Accession No. AAC50060; SEQ ID NO: 2136, and GenBank Accession No. NP_{—}002010; SEQ ID NO: 2137) and described in U.S. Pat. Nos. 6,383,486, 6,375,929, and 6,100,071; soluble IL-4 receptors are described U.S. Pat. No. 5,599,905; and soluble IL-1 receptors are described in U.S. Patent Publication No. 20040023869.

[0253] Soluble receptor polypeptides can be modified using any method known in the art to generate a protease-resistant polypeptide, including, but not limited to, the methods described in US Pat. Pub. Nos. US 2004/0132977 and US 2005/0202438. Such protease-resistant soluble receptor polypeptides can be prepared as an oral dosage formulation using the methods provided herein.

[0254] g. Chemokines

[0255] Oral dosage formulations of protease-resistant polypeptides can include a protease-resistant polypeptide that is a chemokine. Exemplary of chemokines include, but are not limited to, IP-10 (GenBank Accession No. P02778; SEQ ID NO: 2138), MIG (GenBank Accession No. Q07325; SEQ ID NO: 2139), Groa (GenBank Accession No. P09341; SEQ ID NO: 2140), RANTES (GenBank Accession No. P13501; SEQ ID NO: 2124), MIP-1α (GenBank Accession No. P10147; SEQ ID NO: 2142), MIP-11 (GenBank Accession No. P13236; SEQ ID NO: 2143), MCP-1 (GenBank Accession No. P13500; SEQ ID NO: 2144), PF-4 (GenBank Accession No. P02776; SEQ ID NO: 2145), and any other chemokine, fragment thereof, and fusion protein containing such. The amino acid sequences of chemokines and variants thereof are known in the art, and can be used to generate protease-resistant polypeptides for use in the methods provided herein. For example, amino acid sequences of IP-10 are disclosed in U.S. Pat. Nos. 6,491,906, 5,935,567, 6,153,600, 5,728,377, and 5,994,292; amino acid sequences of MIG are disclosed in U.S. Pat. No. 6,491,906, and Farber et al., (1993) Biochem. Biophys. Res. Comm. 192(1):223-230; and amino acid sequences of RANTES are disclosed in U.S. Pat. Nos. 6,709,649, 6,168,784, and 5,965,697.

[0256] Chemokine polypeptides can be modified using any method known in the art to generate a protease-resistant polypeptide, including, but not limited to, the methods described in US Pat. Pub. Nos. US 2004/0132977 and US 2005/0202438. Such protease-resistant chemokine polypeptides can be prepared as an oral dosage formulation using the methods provided herein.

[0257] h. Angiogenic Agents

[0258] Oral dosage formulations of protease-resistant polypeptides can include a protease-resistant polypeptide that is an angiogenic agent. Exemplary of angiogenic agents include, include, but are not limited to, VEGF polypeptides, including VEGF₁₂₁ (QenBank Accession No. AAF19659; SEQ ID NO: 2152 and GenBank Accession No. ABO26344; SEQ ID NO: 2153), VEGF₁₆₅ (GenBank Accession No. P15692-4; SEQ ID NO: 2154), VEGF-A (GenBank Accession No. P15692; SEQ ID NO: 2146), VEGF-B (GenBank Accession No. P49765; SEQ ID NO: 2147), VEGF-C (GenBank Accession No. P49767; SEQ ID NO: 2148), and VEGF-D (GenBank Accession No. O43915; SEQ ID NO: 2149), transforming growth factor-beta (GenBank Accession No. P01137; SEQ ID NO: 2150), basic fibroblast growth factor (GenBank Accession No. P09038; SEQ ID NO: 2132) angiogenin (GenBank Accession No. P03950; SEQ ID NO: 2151) and gliomas-derived growth factor. The amino acid sequences of angiogenic agents and variants thereof are known in the art and can be used to generate protease-resistant polypeptides for use in the methods provided herein. For example, amino acid sequences of VEGF polypeptides are disclosed in U.S. Pat. Nos. 5,194,596, 5,332,671, 5,240,848, 6,475,796, 6,485,942, and 6,057,428; amino acid sequences of VEGF-C (also known as VEGF-2) polypeptides are disclosed in U.S. Pat. Nos. 5,726,152 and 6,608,182; and amino acid sequences of glioma-derived growth factors having angiogenic activity are disclosed in U.S. Pat. Nos. 5,338,840 and 5,532,343. Angiogenic agent polypeptides can be modified using any method known in the art to generate a protease-resistant polypeptide, including, but not limited to, the methods described in US Pat. Pub. Nos. US 2004/0132977 and US 2005/0202438. Such protease-resistant angiogenic agent polypeptides can be prepared as an oral dosage formulation using the methods provided herein

[0259] i. Neuroactive Peptides

[0260] Oral dosage formulations of protease-resistant polypeptides can include a protease-resistant polypeptide that is a neuroactive peptide. Exemplary of neuroactive peptides include, but are not limited to, nerve growth factor, bradykinin, cholecystokinin, gastin, secretin, oxytocin, gonadotropin-releasing hormone, beta-endorphin, enkephalin, substance P, somatostatin, prolactin, galanin, growth hormone-releasing hormone, bombesin, dynorphin, neurotensin, motilin, thyrotropin, neuropeptide Y, luteinizing hormone, calcitonin, insulin, glucagons, vasopressin, angiotens in II, thyrotropin-releasing hormone, vasoactive intestinal peptide, and sleep peptide. Neuroactive peptide polypeptides can be modified using any method known in the art to generate a protease-resistant polypeptide, including, but not limited to, the methods described in US Pat. Pub. Nos. US 2004/0132977 and US 2005/0202438. Such protease-resistant neuroactive peptide polypeptides can be prepared as an oral dosage formulation using the methods provided herein.

[0261] j. Additional Proteins

[0262] Additional exemplary polypeptides for use in the oral dosage formulations provided in the methods herein include other proteins of pharmacologic interest including, but not limited to, thrombolytic agents, atrial natriuretic peptides, bone morphogenic protein, thrombopoletin, glial fibrillary acidic protein, follicle stimulating hormone, alpha-1 antitrypsin, leukemia inhibitory factor, transforming growth factor, insulin-like growth factor, a luteinizing hormone, macrophage activating factor, tumor necrosis factor, a neutrophil chemotactic factor, a nerve growth factor, a tissue inhibitor of metalloproteinases, a vasoactive intestinal peptide, angiotropin, fibrin, hirudin, and leukemia inhibitory factor.

### E. ORAL DOSAGE FORMULATIONS OF IFN-α PROTEASE-RESISTANT POLYPEPTIDES

[0263] Oral dosage formulations for oral administration of amounts of protease-resistant polypeptide to achieve therapeutically effective amounts in the bloodstream. Exemplary of such polypeptides is interferon-α (IFN-α). Such protease-resistant polypeptides can be used in the treatment of any disease or condition for which a native or wild-type or other mutant form of the polypeptide, such as IFN-α, is administered. Native or wild-type and other forms of IFN-α are administered for the treatment of a variety of diseases or conditions, some of which are described below, including chronic hepatitis C viral infections, chronic hepatitis B viral infection, condylomata acuminate, and cancers such as hairy cell leukemia, malignant lymphoma, follicular lymphoma, and AIDS-related Karposi sarcoma. Treatment of these diseases or conditions with other forms of IFN-α, however, is by subcutaneous and intravenous routes non-resistant polypeptides do not reach therapeutic levels in the bloodstream when administered orally. As shown in the Examples provided below, little or no native IFN-α (i.e. IFN-α that has not been modified to be protease resistant) is absorbed into the bloodstream following oral administration, even when the native IFN-α polypeptide formulation is delivered to the lower intestinal tract via an enteric coating (see e.g., Examples 9 and 11 for studies done in both rats and primates). By contrast, the oral dosage formulations provided herein containing protease-resistant IFN-α polypeptides can be absorbed into the bloodstream when administered orally.

[0264] As shown in the Examples, oral delivery of a protease-resistant IFN-α polypeptide, IFN-α(E41Q), via various forms of oral administration, including enterically-coated tablets and capsules, intraduodenal delivery and liquid gavage, results in high levels of absorption of IFN-α polypeptide into the bloodstream. Furthermore, administration of oral dosage formulations of a protease-resistant IFN-α polypeptide can achieve levels of IFN-α in the blood comparable to the levels observed for subcutaneous administration (see e.g., Table 69). Hence, the oral formulations of protease-resistant IFN-α polypeptides provided herein provide a way to achieve therapeutically effective amounts of IFN-α by oral administration.

[0265] 1. Protease-Resistant IFN-α Polypeptides

[0266] Exemplary IFN-α protease-resistant polypeptides include one or more amino acid modifications in the primary amino acid sequence of an IFN-α polypeptide, such as an IFN-α2b polypeptide (SEQ ID NO: 2067), where the one or more amino acid replacements lead to greater resistance to proteases, including but not limited to proteases of the gastrointestinal tract. Such modifications include, but are not limited to, modifications shown in Table 2, where the replacements are made compared to the sequence of amino acids set forth in SEQ ID NO: 2067. Such modifications can be made in an IFN-α2b polypeptide (SEQ ID NO: 2067) or any allelic or species variant thereof.

[0267] The oral dosage formulations provided of IFN-α protease-resistant polypeptides also can contain allelic variants and structural homologues of IFNα-2b that are modified by one or more amino acid replacements in the primary amino acid sequence of the polypeptide that lead to greater resistance to proteases, including but not limited to proteases of the gastrointestinal tract. Such allelic variants and structural homologues of IFNα-2b include, but are not limited to, IFNα-2a (SEQ ID NO: 2162), IFNα-c (SEQ ID NO: 2163), IFNα-2c (SEQ ID NO: 2164), IFNα-d (SEQ ID NO: 2165), IFNα-5 (SEQ ID NO: 2166), IFNα-6 (SEQ ID NO: 2167), IFNα-4 (SEQ ID NO: 2168), IFNα-4-b (SEQ ID NO: 2169), IFNα-I (SEQ ID NO: 2170), IFNα-J (SEQ ID NO: 2171), IFNα-H (SEQ ID NO: 2172), IFNα-F (SEQ ID NO: 2173), IFNα-8 (SEQ ID NO: 2174) and IFNα-consensus cytokine (SEQ ID NO: 2175), and other consensus cytokines disclosed, for example in U.S. Pat. Nos. 4,695,623 and 4,897,471 (e.g., IFN-con1 is the consensus interferon agent in the InfergenB alfacon-1 product (interferon alfacon-1, InterMune, Inc., Brisbane, Calif.)).

[0268] Accordingly, the modified IFNα cytokines for use in the oral dosage formulations provided are those with one or more amino acid replacements at one or more amino acid positions in either IFNα-2a, IFNα-c, IFNα-2c, IFNα-d, IFNα-5, IFNα-6, IFNα-4, IFNα-4b, IFNα-I, IFNα-J, IFNα-H, IFNα-F, IFNα-8, or IFNα-consensus cytokine corresponding to a structurally-related modified amino acid position within the 3-dimensional structure of the IFNα-2b modified proteins for protease-resistance, such as for example, IFNα-2b modifications presented in Table 2.

[0269] In a particular example of a protease-resistant IFN-α that can be used in the oral dosage formulations provided, the modification in an IFN-α polypeptide is replacement of a glutamic acid residue (E) with a glutamine residue (Q). Exemplary of such replacement is replacement of a glutamic acid residue (E) with a glutamine residue (Q) at position 41 in a mature IFN-α (e.g., a mature IFN-α is set forth in SEQ ID NO: 2067) or allelic or species variants thereof. Further, an exemplary protease-resistance polypeptide is an IFN-α2b mature polypeptide, where the glutamic acid residue (E) at position 41 is replaced with a glutamine residue (Q) (referred to herein as IFN-α2b(E41Q); SEQ ID NO: 1995). An exemplary mature human IFN-α2b(E41Q) polypeptide that can be used in the oral dosage formulations provided herein has the following sequence of amino acids:

(SEQ ID NO: 1995)

CDLPQTHSLGSRRTLMLLAQMRRISLFSCLKDRHDFGFPQQEFGNQFQKA
ETIPVLHEMIQQIFNLFSTKDSSAAWDETLLDKFYTELYQQLNDLEACVI
QGVGVTETPLMKEDSILAVRKYFQRITLYLKEKKYSPCAWEVVRAEIMRS
FSLSTNLQESLRSKE.

[0270] a. Further Modifications of Protease-Resistant IFN-α Polypeptides

[0271] Protease-resistant IFN-α polypeptides for use in the oral dosage formulations provided also include protease-resistant IFN-α polypeptides that have been further modified by glycosylation, carboxylation, hydroxylation, hasylation, carbamylation, sulfation, phosphorylation, and/or PEGylation. Protease-resistant IFN-α polypeptides for use in the oral dosage formulations provided also include protease-resistant IFN-α polypeptides that have been further modified by one or more amino acid modifications that contribute to, for example, increased activity (e.g., increased antiviral activity), altered immunogenicity, stability, thermal tolerance, protease-resistance, glycosylation, carboxylation, hydroxylation, hasylation, carbamylation, sulfation, phosphorylation, and/or PEGylation. Such amino acid modifications can be natural amino acids, non-natural amino acids or a combination of natural and non-natural amino acids. The protease-resistant IFN-α polypeptides for use in the oral dosage formulations provided also can be conjugated or expressed as a fusion protein with one or more proteins or peptides, such as albumin. In addition, protein modifications also can include modification to facilitate the detection, purification, and assay development of an IFN-α polypeptide, such as for example, modification of a polypeptide with a Sulfo-NHS-LC-biotin for covalent attachment to a primary amine on a protein, or other similar modification for florescent, non-isotopic, or radioactive labels. Generally, the modification results in increased stability without losing at least one activity, such as antiviral activity (i.e., retains at least one activity as defined herein) of an unmodified IFN-α polypeptide.

[0272] Modifications to decrease immunogenicity of the IFN-α polypeptide typically involve replacement of at least one amino acid residue resulting in a substantial reduction in activity of or elimination of one or more T cell epitopes from the protein, i.e., deimmunization of the polypeptide. One or more amino acid modifications at particular positions within any of the MHC class II ligands can result in a deimmunized IFN-α polypeptide with a reduced immunogenic when administered as a therapeutic to a host, such as for example, a human host. Exemplary modifications to decrease the immunogenicity of the IFN-α polypeptide include, for example, mutations disclosed in U.S. Patent Application Publication No. US2006/0062761 A1, such as but not limited to, amino acid modifications at one or more positions corresponding to any of the following positions: I24P, L26P, F27S, F38E, I63T, F64A, F64C, F64D, F64E, F64G, F64H, F64K, F64M, F64N, F64P, F64Q, F64R, F64S, F64T, F64W, F64Y, N65A, N65C, N65D, N65E, N65F, N65G, N65H, N65I, N65K, N65L, N65M, N65P, N65Q, N65R, N65S, N65T, N65V, N65W, N65YL66A, L66C, L66D, L66E, L66G, L66H, L66K, L66N, L66P, L66Q, L66R, L66S, L66T, L66M, L66V, L66W, L66Y, F67A, F67C, F67D, F67E, F67G, F67H, F67K, F67N, F67P, F67Q, F67R, F67S, F67T, F67M, F67V, F67W, F67Y, S68A, S68F, S68G, S68H, S68I, S68M, S68P, S68T, S68V, S68W, S68Y, K70A, K70C, K70H, K70P, D71F, D71H, D71I, D71L, D71P, D71T, D71V, D71W, D71Y, S72D, S72H, S72P, S72T, S72W, S72Y, S73A, S73C, S73G, S73P, S73T, A74D, A74P, A74Q, A74R, A74S, A74T, A75C, A75D, A75E, A75G, A75H, A75K, A75N, A75P, A75Q, A75R, A75S, A75T, A75W, A75, A75, AW76A, W76C, W76D, W76E, W76G, W76H, W76K, W76N, W76P, W76Q, W76R, W76S, W76T, W76M, W76, WE78A, E78C, E78G, F84D, F84E, FY85S, Y89E, Y89N, Y89D, V103E, L110G, L110S, M111T, M111S, M111E, K112A, K112C, K112G, K112P, D114P, S115A, S115C, S115D, S115F, S115G, S115H, S115I, S115P, S115W, S115Y, I116A, I116C, I116D, I116E, I116G, I116H, I116K, I116N, I116P, I116Q, I116R, I116S, I116T, I116W, I116Y, L117A, L117C, L117D, L117E, L117G, L117H, L117K, L117N, L117P, L117Q, L117R, L117S, L117T, L117M, L117W, L117Y, V118D, V118E, V118H, V1118K, V118N, V118P, V118Q, V118R, V118S, V118T, V118, V118, V118, V118, V119A, V119C, V119G, V119P, V119T, R120P, Y122A, Y122C, Y122D, Y122E, Y122G, Y122H, Y122K, Y122N, Y122P, Y122Q, Y122R, Y122S, Y122T, Y122, F123A, F123C, F123D, F123E, F123G, F123H, F123K, F123N, F123P, F123Q, F123R, F123S, F123T, F123, Q124A, Q124C, Q124G, Q124H, Q1241, Q124M, Q124P, Q124T, Q124V, Q124W, Q124Y, Q124, Q124, Q124, R125P, R125T, R125W, R125Y, I126A, I126C, I126D, I126E, I126G, I126H, I126K, I126N, I126P, I126Q, I126R, I126S, I126T, I126M, T127P, T127W, T127Y, L128A, L128C, L128G, L128P, L128Q, L128R, L128S, L128T, Y129D, Y129E, Y129H, Y129K, Y129P, Y129Q, Y129R, Y129S, Y129T, Y129M, and L153S of a mature IFN-α polypeptide set forth in SEQ ID NO: 2067 or an allelic or species variant thereof.

[0273] The degree of glycosylation of IFN-α polypeptides for use in the oral dosage formulations provided can be altered in order to achieve 1) reduced immunogenicity; 2) less frequent administration of the protein; 3) increased protein stability such as increased serum half-life; and 4) reduction in adverse side effects such as inflammation. The further glycosylation of an IFN-α polypeptide confers one or more advantages including increased serum half-life; reduced immunogenicity; increased functional in vivo half-life; reduced degradation by gastrointestinal tract conditions such as gastrointestinal tract proteases; and increased rate of absorption by gut epithelial cells. An increased rate of absorption by gut epithelial cells and reduced degradation by gastrointestinal tract conditions is important for enteral oral formulations of an IFN-α polypeptide.

[0274] A hyperglycosylated IFN-α polypeptide for use in the oral dosage formulations provided can include O-linked glycosylation, N-linked glycosylation, and/or a combination thereof. In some examples, a hyperglycosylated IFN-α polypeptide can include 1, 2, 3, 4, 5, or more carbohydrate moieties, each linked to different glycosylation sites. The glycosylation site can be a native or non-native glycosylation site. In other examples, the hyperglycosylated polypeptide can be glycosylated at a single non-native glycosylation site. In other examples, the hyperglycosylated polypeptide can be glycosylated at more than one non-native glycosylation site, for examples, the hyperglycosylated IFN-α polypeptide can be glycosylated at 1, 2, 3, 4, 5, or more non-native glycosylation sites. Glycosylation sites in an IFN-α polypeptide can be created, altered, eliminated, or rearranged. For example, native glycosylation sites can be modified to prevent glycosylation or enhance or decrease glycosylation, while other positions in the IFN-α polypeptide can be modified to create new glycosylation sites or enhance or decrease glycosylation of existing sites. In some examples, the carbohydrate content of the IFN-α polypeptide can be modified. For example, the number position, bond strength, structure and composition of the carbohydrate linkages (i.e., structure of the carbohydrate based on the nature of the glycosidic linkages or branches of the carbohydrate) of carbohydrate moieties added to the IFN-α polypeptide can be altered.

[0275] Changes in the carbohydrate content of the glycosylated IFN-α polypeptides for use in the oral dosage formulations provided, including sialic acid content, can be generated by any method known in the art including but not limited to modification of the primary sequence of the IFN-α polypeptide, enzymatic or chemical modification, production in different host cells, or modified host cells, to produce differences in the glycosylation pattern, and purification methods to enrich IFN-α polypeptides with specific glycosylation profiles. Additionally, growth conditions (e.g., media composition) in which host cells express the modified IFN-α polypeptides can be altered to provide changes in glycosylation, in particular, sialic acid content.

[0276] Any amino acid modification that contributes to altered glycosylation of the IFN-α polypeptide can be combined with one or more modifications that increase protease-resistance of the IFN-α polypeptide for use in the oral dosage formulations provided. Exemplary amino acid modifications for modification of an IFN-α glycosylation site, for attachment of a carbohydrate moiety, are described in, for example U.S. Patent Publication No. 2004/0132977-A1 and International PCT Application Publication Nos. WO2006/020580 and WO 2004/022593, and include exemplary modifications corresponding to D2N/P4S, D2N/P4T, L3N/Q5S, L3N/Q5T, P4N/T6S, P4N/T6T, Q5N/H7S, Q5N/H7T, T6N/S8S, T6N/S8T, H7N/L9S, H7N/L9T, S8N/G10S, S8N/G10T, L9N/S11S, L9N/S11T, M21N/K23S, M21N/K23T, R22N/I24S, R22N/I24T, R23N/S25S, R23N/S25T, I24N/L26S, I24N/L26T, S25N/F27S, S25N/F27T, L26N/S28S, L26N/S28T, S28N/L30S, S28N/L30T, L30N/D32S, L30N/D32T, K31N/R33S, K31N/R33T, D32N/H34S, D32N/H34T, R33N/D35S, R33N/D35T, H34N/F36S, H34N/F36T, D35N/G37S, D35N/G37T, F36N/F38S, F36N/F38T, G37N/P39S, G37N/P39T, F38N/Q40S, F38N/Q40T, P39N/E41S, P39N/E41T, Q40N/E42S, Q40N/E42T, E41N/F43S, E41N/F43T, E42N/G44S, E42N/G44T, F43N/N45S, F43N/N45T, G44N/Q46S, G44N/Q46T, N45N/F47S, N45N/F47T, Q46N/Q48S, Q46N/Q48T, F47N/K49S, F47N/K49T, Q48N/A50S, Q48N/A50T, K49N/E51S, K49N/E51T, A50N/T52S, A50N/T52T, S68N/K70S, S68N/K70T, K70N/S72S, K70N/S72T, A75N/D77S, A75N/D77T, D77N/T79S, D77N/T79T, I100N/G102S, I100N/G102T, Q101N/V103S, Q101N/V103T, G102N/G104S, G102N/G104T, V103N/V105S, V103N/V105T, G104N/T106S, G104N/T106T, V105N/E107S, V105N/E107T, T106N/T108S, T106N/T108T, E107N/P109S, E107N/P109T, T108N/I110S, T108N/I110T, K134N/S136S, K134N/S136T, S154N/N156S, S154N/N156T, T155N/L157S, T155N/L157T, N156N/Q158S, N156N/Q158T, L157N/E159S, L157N/E159T, Q158N/S160S, Q158N/S160T, E159N/L161S, E159N/L161T, S160N/R162S, S160N/R162T, L161N/S163S, L161N/S163T, R162N/K164S, R162N/K164T, S163N/E165S, S163N/E165T, D71N, D77N, T106N, D71N/D77N, D71N/T106N, D77N/T106N and D71N/D77N/T106N of a mature IFN-α polypeptide set forth in SEQ ID NO: 2067 or an allelic or species variant thereof.

[0277] 2. Expression of Protease-Resistant IFN-α Polypeptides

[0278] Protease-resistant IFN-α polypeptides for the use in the oral formulations provided can be generated by any method known in the art, including, for example introduction of nucleic acid molecules encoding the protease-resistant IFN-α polypeptide, such as IFN-α2b(E41Q), into a host cell or host animal and expression from nucleic acid molecules encoding the protease-resistant IFN-α polypeptide. Expression hosts include E. coli, yeast, plants (e.g., algae), insect cells, mammalian cells, including cell lines (e.g., Chinese hamster ovary (CHO) cells, Baby hamster kidney (BHK) cells, VERO, HT1080, MDCK, W138, Balb/3T3, HeLa, MT2, mouse NSO (non-secreting) and other myeloma cell lines, hybridoma and heterohybridoma cell lines, lymphocytes, RPMI 1788 cells, fibroblasts, Sp2/0, COS, NIH3T3, HEK293, 293S, 2B8, EBNA-1, and HKB cells (see e.g. U.S. Pat. Nos. 5,618,698, 6,777,205)) and transgenic animals (e.g., production in serum, urine, milk and eggs). Expression hosts can differ in their protein production levels as well as the types of post-translational modifications that are present on the expressed proteins. The choice of expression host can be made based on these and other factors, such as regulatory and safety considerations, production costs and the need and methods for purification.

[0279] 3. Oral Formulations and Unit Dosage Forms

[0280] Protease-resistant IFN-α polypeptides, such as IFN-α2b(E41Q) polypeptides, can be formulated for oral administration as described herein. For example, protease-resistant IFN-α polypeptides can be formulated with one or more pharmaceutically acceptable excipients and lyophilized to generate a powder that can be used to fill a capsule or compressed into a tablet. Such tablets or capsules containing protease-resistant IFN-α polypeptide can optionally include an enteric coating to effect the delivery of the polypeptide to the lower intestinal tract.

[0281] Exemplary oral dosage formulations of a protease-resistant IFN-α2b(E41Q) polypeptide are provided in the Examples below. Exemplary steps for the production of the oral dosage formulations of a protease-resistant IFN-α2b(E41Q) polypeptide are provided in the Examples, such as, for the production and purification of the IFN-α2b(E41Q) polypeptide (see e.g., Examples 2, 3, and 4), and production and purification of the lyophilized protein (Example 5).

[0282] The oral dosage formulations containing a protease-resistant IFN-α polypeptide, such as IFN-α2b(E41Q) polypeptide, contain one or a plurality of unit dosage forms. Exemplary unit dosage forms include tablets or capsules containing an amount of a protease-resistant IFN-α polypeptide that is a full or a fraction of dosage to be administered for the treatment of a disease or condition. The amount of polypeptide contained in a tablet or a capsule is dependent on various factors, including the desired unit dosage for the disease or condition to be treated, the maximum size of the tablet of capsule, the properties of the pharmaceutical excipients, and the properties of the lyophilized polypeptide. Typically, the unit dosage form contains about 0.001-100 mg of the polypeptide. Exemplary processes for the production of unit dosage forms containing an IFN-α2b(E41Q) polypeptide, including enterically-coated unit dosage forms containing an IFN-α2b(E41Q) polypeptide are provided in the Examples below (see e.g., Example 6). Exemplary unit dosage forms of IFN-α2b(E41Q) are described in Example 6 below, and include, for example, 40 μg, 200 μg and 450 μg of the IFN-α2b(E41Q) polypeptide in a 150 mg compressed tablet. Such unit dosage forms are exemplary and are not intended to limit the amount of a protease-resistant IFN-α polypeptide that can formulated into unit dosage form, such as a tablet or a capsule.

[0283] For treatment, the oral dosage formulation can be administered daily, two or more times per day, 6 times per week, 5 times per week, 4 times per week, 3 times per week, 2 times per week, or once per week. Typically, the oral dosage formulation is administered daily.

[0284] Oral dosage formulations of protease-resistant IFN-α polypeptides, generally are higher, generally about or 6-400 times, such as 10-100 times, including, for example, 15-50 times, 20-30 times, typically 15-40 times higher (depending upon the therapeutic protein and indication treated and the formulation) per day, than amounts that are administered subcutaneously for the same indication using an unmodified therapeutic protein in the same individual.

[0285] For the treatment of HCV, native or other IFN-α polypeptides are administered subcutaneously at a dosage of 12 μg per dose per 70 kg human, three times a week to provide a weekly dosage of 36 μg per week. In an exemplary oral dosage formulation for IFN-α2b(E41Q) where the disease to be treated is an HCV viral infection, exemplary dosage formulations provide herein are selected generally in the range from generally about or 6-200 times, such as 10-100 times, including, for example, 15-50 times, 20-30 times, typically 15-40 times higher than the subcutaneous dose of native IFN-α peptides. For example, the protease resistant IFN-α polypeptide can be administered in a dosage generally about 70-2400 μg, such as 120-1200 μg, including, for example, 180-600 μg, 240-360 μg, typically 180-480 μg. The dosage formulations are provided as dosage unit capsules or tablets contain 6, 12, 18, 24, 32, 40, 50, 60 μg or more per dosage unit. Multiple dosage units typically are administered as an oral dosage formulation.

[0286] Such oral formulations can be administered daily for the treatment of HCV infection to provide a weekly dosage of generally about 500-16800 μg, such as 840-8400 μg, including, for example, 1260-4200 μg, 1680-2520 μg, typically 1260-3360 μg. Alternatively, such oral formulations can be administered more or less frequently. For example, oral dosage formulations for the treatment of HCV can be administered 3 times a week to provide a weekly dosage of about of generally about 210-7200 μg, such as 360-3600 μg, including, for example, 540-1800 μg, 720-1080 μg, typically 540-1440 μg.

[0287] Provided are dosage units that contain 10 μg, 20 μg, 30 μg, 40 μg, 50 μg, 60 μg, 70 μg, 80 μg, 90 μg, 100 μg, 120 μg, 150 μg, 300 μg and more modified IFN-α2b. Such dosage units can be administered one at time or a plurality at a time. For example, for treatment of HCV infection treatment is effected by daily administration of 30 μg-950 μg/day or about or 80 μg to 6600 μg/week. For example, 80 μg-2200 μg dosage units can be administered daily or three times a week for as long as treatment is indicated.

### F. ORAL DOSAGE FORMULATIONS OF GROWTH HORMONE PROTEASE-RESISTANT POLYPEPTIDES

[0288] As mentioned above, oral dosage formulations provided can contain a protease-resistance polypeptide that is a modified growth hormone, such a human growth hormone (hGH). Such protease-resistant polypeptides can be used in the treatment of any disease or condition for which a native or wild-type form of the hGH polypeptide is administered. Native or wild-type forms of hGH are administered for the treatment of a variety of diseases or conditions, some of which are described below, including pediatric and adult growth deficiency disorders (including but not limited to Turner's syndrome, intrauterine growth retardation, idiopathic short stature, Prader Willi syndrome, Thalassaemia), AIDS wasting, aging, impaired immune function of HIV-infected subjects, catabolic illnesses (including those associated with respiratory failure and burn injuries), recovery from surgery, congestive cardiomyopathy, liver transplantation, liver regeneration after hepatectomy, chronic renal failure, renal osteodystrophy, osteoporosis, achondroplasia/hypochondroplasia, skeletal dysplasia, chronic inflammatory or nutritional disorders (such as Crohn's disease), short bowel syndrome, juvenile chronic arthritis, cystic fibrosis, male infertility, X-linked hypophosphatemic rickets, Down's syndrome, Spina bifida, Noonan Syndrome, obesity, impaired muscle strength and fibromyalgia. Treatment of these diseases or conditions with native hGH, however, is limited to subcutaneous and intravenous routes since degradation of the native polypeptide in the gastrointestinal tract when administered via the oral route prevents absorption of the therapeutic polypeptide into the bloodstream. As shown in the Examples provided below, little or no native hGH is absorbed into the bloodstream following oral administration (see e.g., Example 27). By contrast, the oral dosage formulations provided herein containing protease-resistant hGH polypeptides can be absorbed into the bloodstream when administered orally.

[0289] As shown in the Examples, oral delivery of protease-resistant hGH polypeptides, hGH(Y42I) and hGH(Y42H), via various forms of oral administration, including capsules or liquid gavage, results in high levels of absorption of hGH polypeptides into the bloodstream. The absorbed protease-resistant hGH polypeptides exhibit growth hormone activity comparable to native hGH administered subcutaneously (see e.g., Example 28). Furthermore, administration of oral dosage formulations of protease-resistant hGH polypeptides can achieve levels of hGH in the blood comparable to the levels observed for subcutaneous administration (see e.g., Examples 26 and 27). Hence, the oral formulations of protease-resistant hGH polypeptides provided herein provide a way to achieve therapeutically effective amounts of hGH by oral administration.

[0290] 1. Protease-Resistant Growth Hormone Polypeptides

[0291] Exemplary hGH protease-resistant polypeptides include one or more amino acid modifications in the primary amino acid sequence of a growth hormone polypeptide, such as a human growth hormone polypeptide (SEQ ID NO: 1260), where the one or more amino acid replacements lead to greater resistance to proteases, including but not limited to proteases of the gastrointestinal tract. Such modifications include, but are not limited to, modifications shown in Table 8, where the replacements are made compared to the sequence of amino acids set forth in SEQ ID NO: 1260. The modifications can be made in hGH polypeptide (SEQ ID NO: 1260) or any allelic or species variant thereof.

[0292] In a particular example of a protease-resistant hGH polypeptide that can be used in the oral dosage formulations provided, the modification in an hGH polypeptide is replacement of a tyrosine residue (Y) with an isoleucine residue (I) or a histidine residue (H). Exemplary of such replacement is replacement of a tyrosine residue (Y) with an isoleucine residue (I) at position 42 in a mature hGH (e.g., SEQ ID NO: 1318) or allelic or sequence variants thereof. Another example of such replacement is replacement of a tyrosine residue (Y) with an isoleucine residue (H) at position 42 in a mature hGH (e.g., SEQ ID NO: 1317) or allelic or sequence variants thereof.

[0293] An exemplary mature hGH polypeptide that can be used in the oral dosage formulations provided herein is hGH(Y42I) polypeptide and has the following sequence of amino acids:

(SEQ ID NO: 1995)

CDLPQTHSLGSRRTLMLLAQMRRISLFSCLKDRHDFGFPQQEFGNQFQKA
ETIPVLHEMIQQIFNLFSTKDSSAAWDETLLDKFYTELYQQLNDLEACVI
QGVGVTETPLMKEDSILAVRKYFQRITLYLKEKKYSPCAWEVVRAEIMRS
FSLSTNLQESLRSKE.

[0294] An exemplary mature hGH polypeptide that can be used in the oral dosage formulations provided herein is hGH(Y42H) polypeptide and has the following sequence of amino acids:

(SEQ ID NO: 1317)

FPTIPLSRLFDNAMLRAHRLHQLAFDTYQEFEEAYIPKEQKHSFLQNPQT
SLCFSESIPTPSNREETQQKSNLELLRISLLLIQSWLEPVQFLRSVFANS
LVYGASDSNVYDLLKDLEEGIQTLMGRLEDGSPRTGQIFKQTYSKFDTNS
HNDDALLKNYGLLYCFRKDMDKVETFLRIVQCRSVEGSCGF.

[0295] a. Other Modifications of Protease-Resistant Growth Hormone Polypeptides

[0296] Protease-resistant hGH polypeptides for use in the oral dosage formulations provided also include protease-resistant hGH polypeptides that have been further modified by glycosylation, carboxylation, hydroxylation, hasylation, carbamylation, sulfation, phosphorylation, and/or PEGylation. Protease-resistant hGH polypeptides for use in the oral dosage formulations provided also include protease-resistant hGH polypeptides that have been further modified by one or more amino acid modifications that contribute to, for example, increased activity (e.g., increased cell proliferation activity), altered immunogenicity, stability, thermal tolerance, protease-resistance, glycosylation, carboxylation, hydroxylation, hasylation, carbamylation, sulfation, phosphorylation, and/or PEGylation. Such amino acid modifications can be natural amino acids, non-natural amino acids or a combination of natural and non-natural amino acids. The protease-resistant hGH polypeptides for use in the oral dosage formulations provided also can be conjugated or expressed as a fusion protein with one or more proteins or peptides, such as albumin. In addition, protein modifications also can include modification to facilitate the detection; purification, and assay development of an hGH polypeptide, such as for example, modification of a polypeptide with a Sulfo-NHS-LC-biotin for covalent attachment to a primary amine on a protein, or other similar modification for florescent, non-isotopic, or radioactive labels. Generally, the modification results in increased stability without losing at least one activity, such as cell proliferation activity (i.e., retains at least one activity as defined herein) of an unmodified hGH polypeptide.

[0297] Others have provided hGH molecules including modified hGH and schemes for its recombinant production, purification and therapeutic use [EP 0107890, U.S. Pat. No. 4,517,181, EP 0105759; U.S. Pat. No. 4,703,035; U.S. Pat. No. 4,658,021; EP0022242; EP0001929; EP0001939; U.S. Pat. No. 4,342,832; U.S. Pat. No. 4,601,980; U.S. Pat. No. 4,604,359; U.S. Pat. No. 4,634,677; U.S. Pat. No. 4,898,830; U.S. Pat. No. 5,424,119; U.S. Pat. No. 4,366,246; U.S. Pat. No. 4,425,437; U.S. Pat. No. 4,431,739; U.S. Pat. No. 4,563,424; U.S. Pat. No. 4,571,421; EP 0131843; EP 0319049; U.S. Pat. No. 4,831,120; U.S. Pat. No. 4,871,835; U.S. Pat. No. 4,997,916; U.S. Pat. No. 5,612,315; U.S. Pat. No. 5,633,352; U.S. Pat. No. 5,618,697; U.S. Pat. No. 5,635,604; EP 0127658; EP 0217814; U.S. Pat. No. 5,898,030; EP0804223; U.S. Pat. No. 7,153,943; U.S. Pat. No. 6,451,561; Lowman H. B. & Wells J. A. (1993) J. Mol. Biol. 243: 564-578]. Such modified hGH proteins can be combined with one or modifications for increased protease resistance to be used in the oral dosage forms provided.

[0298] Modifications to decrease immunogenicity of the hGH polypeptide typically involve replacement of at least one amino acid residue resulting in a substantial reduction in activity of or elimination of one or more T cell epitopes from the protein, i.e., deimmunization of the polypeptide. One or more amino acid modifications at particular positions within any of the MHC class II ligands can result in a deimmunized hGH polypeptide with a reduced immunogenic when administered as a therapeutic to a host, such as for example, a human host. Exemplary modifications to decrease the immunogenicity of the hGH polypeptide include, for example, mutations disclosed in U.S. Patent Application Publication No. US2005/0020494-A1.

[0299] The degree of glycosylation of hGH polypeptides for use in the oral dosage formulations provided can be altered in order to achieve 1) reduced immunogenicity; 2) less frequent administration of the protein; 3) increased protein stability such as increased serum half-life; and 4) reduction in adverse side effects such as inflammation. The further glycosylation of an hGH polypeptide confers one or more advantages including increased serum half-life; reduced immunogenicity; increased functional in vivo half-life; reduced degradation by gastrointestinal tract conditions such as gastrointestinal tract proteases; and increased rate of absorption by gut epithelial cells. An increased rate of absorption by gut epithelial cells and reduced degradation by gastrointestinal tract conditions is important for enteral oral formulations of an hGH polypeptide.

[0300] A hyperglycosylated hGH polypeptide for use in the oral dosage formulations provided can include O-linked glycosylation, N-linked glycosylation, and/or a combination thereof. In some examples, a hyperglycosylated hGH polypeptide can include 1, 2, 3, 4, 5, or more carbohydrate moieties, each linked to different glycosylation sites. The glycosylation site can be a native or non-native glycosylation site. In other examples, the hyperglycosylated polypeptide can be glycosylated at a single non-native glycosylation site. In other examples, the hyperglycosylated polypeptide can be glycosylated at more than one non-native glycosylation site, for examples, the hyperglycosylated hGH polypeptide can be glycosylated at 1, 2, 3, 4, 5, or more non-native glycosylation sites. Glycosylation sites in an hGH polypeptide can be created, altered, eliminated, or rearranged. For example, native glycosylation sites can be modified to prevent glycosylation or enhance or decrease glycosylation, while other positions in the hGH polypeptide can be modified to create new glycosylation sites or enhance or decrease glycosylation of existing sites. In some examples, the carbohydrate content of the hGH polypeptide can be modified. For example, the number position, bond strength, structure and composition of the carbohydrate linkages (i.e., structure of the carbohydrate based on the nature of the glycosidic linkages or branches of the carbohydrate) of carbohydrate moieties added to the hGH polypeptide can be altered.

[0301] Changes in the carbohydrate content of the glycosylated hGH polypeptides for use in the oral dosage formulations provided, including sialic acid content, can be generated by any method known in the art including but not limited to modification of the primary sequence of the hGH polypeptide, enzymatic or chemical modification, production in different host cells, or modified host cells, to produce differences in the glycosylation pattern, and purification methods to enrich hGH polypeptides with specific glycosylation profiles. Additionally, growth conditions (e.g., media composition) in which host cells express the modified hGH polypeptides can be altered to provide changes in glycosylation, in particular, sialic acid content.

[0302] Any amino acid modification that contributes to altered glycosylation of the hGH polypeptide can be combined with one or more modifications that increase protease-resistance of the hGH polypeptide for use in the oral dosage formulations provided. Exemplary amino acid modifications for modification of an hGH glycosylation site, for attachment of a carbohydrate moiety, are described in, for example, U.S. Patent Publication No. US2005/0250678 and International PCT Application Publication Nos. WO2006/121569 and WO2002/055532.

[0303] 2. Expression of Nucleic Acid Encoding Protease-Resistant Growth Hormone Polypeptides

[0304] Protease-resistant hGH polypeptides for the use in the dosage units and oral formulations provided here can be produced by any method know in the art, including, for example introduction of nucleic acid molecules encoding the protease-resistant hGH polypeptide, such as hGH(Y42I) or hGH(Y42H), into a host cell or host animal and expression from nucleic acid molecules encoding the protease-resistant hGH polypeptide. Expression hosts include E. coli, yeast, plants (e.g., algae), insect cells, mammalian cells, including cell lines (e.g., Chinese hamster ovary (CHO) cells, Baby hamster kidney (BHK) cells, VERO, HT1080, MDCK, W138, Balb/3T3, HeLa, MT2, mouse NSO (non-secreting) and other myeloma cell lines, hybridoma and heterohybridoma cell lines, lymphocytes, RPMI 1788 cells, fibroblasts, Sp2/0, COS, NIH3T3, HEK293, 293S, 2B8, EBNA-1, and HKB cells (see e.g. U.S. Pat. Nos. 5,618,698, 6,777,205)) and transgenic animals (e.g., production in serum, urine, milk and eggs). Expression hosts can differ in their protein production levels as well as the types of post-translational modifications that are present on the expressed proteins. The choice of expression host can be made based on these and other factors, such as regulatory and safety considerations, production costs and the need and methods for purification.

[0305] 3. Oral Formulations and Unit Dosage Forms

[0306] Protease-resistant hGH polypeptides, such as hGH(Y42I) and hGH(Y42H) polypeptides, can be formulated for oral administration as described herein. Tablets and/or capsules containing the modified hGH polypeptides are provided. For example, protease-resistant hGH polypeptides can be formulated with one or more pharmaceutically acceptable excipients and lyophilized to generate a powder that can be used to fill a capsule or compressed into a tablet. Such tablets or capsules containing a protease-resistant hGH polypeptides optionally include an enteric coating to effect the delivery of the polypeptide to the lower intestinal tract.

[0307] Exemplary unit oral dosage formulations of a protease-resistant hGH(Y42I) polypeptide are provided in the Examples below. Exemplary steps for the production of the oral dosage formulations of a protease-resistant hGH(Y42I) polypeptide are provided in the Examples, such as, for the production and purification of the hGH(Y42I) polypeptide (see e.g., Examples 21), and production and purification of the lyophilized protein (Example 22).

[0308] The oral dosage formulations containing a protease-resistant hGH polypeptide, such as hGH(Y42I) or hGH(Y42H) polypeptide, contain one or a plurality of unit dosage forms. Exemplary unit dosage forms include tablets or capsules containing an amount of a protease-resistant IFN-α polypeptide that is a full or a fraction of dosage to be administered for the treatment of a disease or condition. The amount of polypeptide contained in a tablet or a capsule is dependent on various factors, including the desired unit dosage for the disease or condition to be treated, the maximum size of the tablet of capsule, the properties of the pharmaceutical excipients, and the properties of the lyophilized polypeptide. Typically, the unit dosage form contains about 0.001-100 mg, such as 3, 4, 5, 6, 7, 8, 9, 10, 15, 20, 25, 30, 40, 50, 60, 70, 75, 80, 85, 90, 95 or 100 mg of the polypeptide. Higher dosage units can contain more, such as 125 mg or 150 mg. Oral dosage formulations for administration per day or per week can contain a plurality of dosage units.

[0309] Exemplary processes for the production of unit dosage forms containing an hGH(Y42I) or hGH(Y42H) polypeptide, including enterically-coated unit dosage forms containing an hGH(Y42I) or hGH(Y42H) polypeptide are provided in the Examples below (see e.g., Examples 24, 25). Any suitable process based thereon can be sued. Exemplary unit dosage forms of hGH(Y42I) are described in Example 25 below, and include, for example, 3 mg 12 mg and 24 mg of the hGH(Y42I) polypeptide in a 400 mg compressed tablet. Such unit dosage forms are exemplary and are not intended to limit the amount of a protease-resistant IFN-α polypeptide that can formulated into unit dosage form, such as a tablet or a capsule.

[0310] For treatment, the oral dosage formulation can be administered daily, two or more times per day, 6 times per week, 5 times per week, 4 times per week, 3 times per week, 2 times per week or once per week or any regimen determined empirically or by a physician for a particular patient or subject. Typically, the oral dosage formulation is administered daily.

[0311] Oral dosage formulations of protease-resistant hGH polypeptides, generally are higher, generally about or 6-400 times, such as 10-100 times, including, for example, 15-50 times, 20-30 times, typically 15-40 times higher (depending upon the therapeutic protein and indication treated and the formulation) per day, than amounts that are administered subcutaneously for the same indication using an unmodified therapeutic protein in the same individual. Dosage units contain 0.1, 0.5, 2, 3, 4, 5, 6, 7, 8, 9, 10 mg or higher amounts of the modified hGH polypeptide. Hence provided are dosage units containing the noted amounts, as well as 15 mg, 20 mg, 30 mg, 50 mg, 75 mg, 100 mg and higher amounts. Dosage formulations can contain one or a plurality of dosage units.

[0312] For the treatment of a growth hormone deficiency in adults, native hGH peptides are normally administered subcutaneously at a dosage of at our about 0.00625 mg/kg/day for one month followed by a maintenance dose of at or about 0.0125 mg/kg/day. Accordingly, for a 70 kg human, the dosage of native hGH is 0.4375 mg per day for 1 month followed by a maintenance dosage of 0.9375 mg per day. In an exemplary oral dosage formulation for hGH(Y42I), where the disease to be treated is a growth hormone deficiency, exemplary dosage formulations range generally from about 2-90 mg, such as 4-45 mg, including, for example, 6-25 mg, 8-15 mg, and typically 6-18 mg per day. Such dosages can be administered continuously or can be administered for an initial time, such as 1 month dose regimen, followed by a lower maintenance dose, such as, for example about 5-190 mg, such as 9-95 mg, including, for example, 14-47 mg, 18-28 mg, and typically 14-38 mg per day. Such oral formulations can be administered more or less frequently than once per day. The amounts and regimens depend upon the condition treated, the subject and the physician's discretion.

### G. METHODS OF TREATMENT AND USES OF THE ORAL DOSAGE FORMULATIONS

[0313] Oral dosage formulations of protease-resistant therapeutic polypeptides provided herein can be used in methods of treating any disease, disorder, or condition for which a corresponding native therapeutic polypeptide is administered. The oral dosage formulation of a protease-resistant polypeptide or dosage units thereof is/are administered orally to a patient in an amount that can effect an increase in the blood concentration of the polypeptide to an amount that is therapeutically effective for the treatment of the disease, disorder, or condition. Typically, the amount of a protease-resistant polypeptide in a composition for oral administration is greater than the amount of a protease-resistant polypeptide that is administered by methods, such as intravenous or subcutaneous injection. The amount of a protease-resistant polypeptide in a composition for oral administration can be determined empirically with respect to the amount of a protease-resistant or native polypeptide that is administered by methods, such as intravenous or subcutaneous injection. In some examples, the amount of a protease-resistant polypeptide in a composition for oral administration is generally about or 6-400 times, such as 10-100 times, including, for example, 15-50 times, 20-30 times, typically 15-40 times higher (depending upon the therapeutic protein and indication treated and the formulation) per day, than amounts that are administered subcutaneously for the same indication using an unmodified therapeutic protein in the same individual. The concentration of a protease-resistant polypeptide in a formulation for oral administration is effective for the treatment of the disease, disorder, or condition in a patient when administered orally.

[0314] Additionally, because variant polypeptides used in the oral dosage formulations provided herein exhibit increased protein stability, there is more flexibility in the administration of pharmaceutical compositions than their native polypeptide counterparts. Typically, orally ingested polypeptides are administered in the morning before eating (i.e., before digestive enzymes are activated). The modified polypeptides provided herein exhibit protease resistance to digestive enzymes and can offer the ability to administer oral pharmaceutical compositions containing a protease-resistant polypeptide at other periods during the day and under conditions when digestive enzymes are present and active.

[0315] 1. Treatment Methods Using IFN-α

[0316] In one example, the oral dosage formulation of a protease-resistant polypeptide is administered to a patient who has a disease, disorder, or condition that can be treated by administration of an interferon, such as an IFN-α polypeptide. Typically, oral dosage formulations of protease-resistant IFN-α polypeptides provided herein are administered orally using an amount of IFN-α that is generally about or 6-400 times, such as 10-100 times, including, for example, 15-50 times, 20-30 times, typically 15-40 times higher (depending upon the therapeutic protein and indication treated and the formulation) per day, than amounts that are administered subcutaneously for the same indication using an unmodified therapeutic protein in the same individual, Native IFN-α has been administered for the treatment of a hepatitis C virus (HCV) infection at a dosage of 2 million units (or 15 micrograms or 8.0×10⁻¹⁰ mol) per day three times per week for 48 weeks by subcutaneous injection. Oral dosage formulations of protease-resistant IFN-α polypeptides provided herein are administered orally using an amount of IFN-α which is greater than 2 million units (or 15 micrograms or 8.0×10⁻¹⁰ mol). Typically, the oral dosage formulations of protease-resistant IFN-α polypeptides provided herein are administered orally using an amount of a protease IFN-α in an oral dosage formulation that is generally about or 6-400 times, such as 10-100 times, including, for example, 15-50 times, 20-30 times, typically 15-40 times higher per day, than amounts that are administered subcutaneously for treatment of HCV using an unmodified therapeutic protein in the same individual. Exemplary dosages of a protease-resistant IFN-α polypeptide for oral delivery can thus be determined empirically based on dosages of IFN-α polypeptides administered by other methods, such as subcutaneous or intravenous methods.

[0317] In one non-limiting example, oral dosage formulations of protease-resistant IFN-α polypeptides provided herein contain a protease-resistant IFN-α polypeptide, that contains one or more single amino acid replacements at one or more target positions, such as for example, E41 of SEQ ID NO: 2067. Replacement of amino acids at target positions alters or destroys a native protease cleaving site. An exemplary replacement to generate a protease-resistant IFN-α polypeptide includes, but is not limited to, E41Q (SEQ ID NO: 1995).

[0318] The oral dosage formulations of protease-resistant IFN-α polypeptides provided herein can be used for treatment of any condition for which unmodified IFN-α is employed. This section provides exemplary uses of protease-resistant IFN-α polypeptides and administration methods. These described therapies are exemplary and do not limit the applications of oral dosage formulations of protease-resistant IFN-α.

[0319] The oral dosage formulations of protease-resistant IFN-α polypeptides provided herein are intended for use in various therapeutic as well as diagnostic methods in which IFN-α is used for treatment. Such methods include, but are not limited to, methods of treatment of physiological and medical conditions described and listed below. By virtue of their improved stability, protease-resistant IFN-α polypeptides provided herein exhibit improvement in the corresponding in vivo activities and therapeutic effects.

[0320] Exemplary human diseases and/or disorders for which oral dosage formulations of protease-resistant IFN-α polypeptides can be administered include, but are not limited to, cancers and tumors, infectious diseases, venereal diseases, immunologically related diseases and/or autoimmune diseases and disorders, cardiovascular diseases, metabolic diseases, central nervous system diseases, and disorders connected with chemotherapy treatments.

[0321] Exemplary cancers and tumors that can be treated with an oral dosage formulation of a protease-resistant IFN-α polypeptide provided herein include carcinomas containing metastasizing renal carcinomas, melanomas, lymphomas containing follicular lymphomas and cutaneous T cell lymphoma, leukemias containing hairy-cell leukemia, chronic lymphocytic leukemia and chronic myeloid leukemia, cancers of the liver, neck, head and kidneys, multiple myelomas, carcinoid tumors and tumors that appear following an immune deficiency, such as Kaposi's sarcoma in the case of AIDS.

[0322] Exemplary infectious diseases that can be treated with an oral dosage formulation of a protease-resistant IFN-α polypeptide provided herein include viral infections, such as chronic hepatitis B and C and HIV/AIDS, infectious pneumonias and venereal diseases, such as genital warts.

[0323] Exemplary immunologically and auto-immunologically related diseases that can be treated with an oral dosage formulation of a protease-resistant IFN-α polypeptide provided herein include the rejection of tissue or organ grafts, allergies, asthma, psoriasis, rheumatoid arthritis, multiple sclerosis, Crohn's disease and ulcerative colitis.

[0324] Exemplary metabolic diseases that can be treated with an oral dosage formulation of a protease-resistant IFN-α polypeptide provided herein include such non-immune associated diseases as obesity.

[0325] Exemplary inflammatory diseases that can be treated with an oral formulation of a protease-resistant IFN-α polypeptide provided herein include such inflammatory diseases as Behcet's disease.

[0326] Exemplary diseases of the central nervous system that can be treated with an oral dosage formulation of a protease-resistant IFN-α polypeptide provided herein include Alzheimer's disease, Parkinson's disease, schizophrenia and depression.

[0327] Exemplary diseases and disorders that can be treated with an oral dosage formulation of a protease-resistant IFN-α polypeptide provided herein also include healing of wounds, anemia in dialyzed patient, and osteoporosis.

[0328] An oral dosage formulation of a protease-resistant IFN-α polypeptide is useful for treating various IFN-α-mediated disorders, including viral infections, fibrotic disorders, and proliferative disorders. Thus, methods of treating viral infections, fibrotic disorders, and/or proliferative disorders are provided herein. Such methods generally involve administering to an individual in need thereof an effective amount of an oral dosage formulation of a protease-resistant IFN-α polypeptide, wherein the subject protease-resistant IFN-α polypeptide is prepared as described above, e.g., as an enterically coated tablet, pill, or capsule. In some examples, a treatment method further includes administering at least one additional therapeutic agent for treating a viral disorder, a fibrotic disorder or a proliferative disorder. In some examples, a treatment method further includes administering a side effect management agent, to treat a side effect induced by a therapeutic agent.

[0329] a. Fibrotic Disorders

[0330] Provided herein are methods for treating a fibrotic disorder in an individual having a fibrotic disorder. The method generally involves administering to an individual in need thereof an effective amount of a protease-resistant IFN-α polypeptide in an oral dosage formulation provided, wherein the subject protease-resistant IFN-α polypeptide is prepared as described above, e.g., as an enterically coated tablet, pill, or capsule. The methods provide for treatment of fibrotic diseases, including those affecting the lung such as idiopathic pulmonary fibrosis, pulmonary fibrosis from a known etiology, liver fibrosis or cirrhosis, cardiac fibrosis, and renal fibrosis. The etiology can be due to any acute or chronic insult including toxic, metabolic, genetic and infectious agents.

[0331] Fibrosis is generally characterized by the pathologic or excessive accumulation of collagenous connective tissue. Fibrotic disorders include, but are not limited to, collagen disease, interstitial lung disease, human fibrotic lung disease (e.g., obliterative bronchiolitis, idiopathic pulmonary fibrosis, pulmonary fibrosis from a known etiology, tumor stroma in lung disease, systemic sclerosis affecting the lungs, Hermansky-Pudlak syndrome, coal worker's pneumoconiosis, asbestosis, silicosis, chronic pulmonary hypertension, AIDS-associated pulmonary hypertension, and sarcoidosis), fibrotic vascular disease, arterial sclerosis, atherosclerosis, varicose veins, coronary infarcts, cerebral infarcts, myocardial fibrosis, musculoskeletal fibrosis, post-surgical adhesions, human kidney disease (e.g., nephritic syndrome, Alport's syndrome, HIV-associated nephropathy, polycystic kidney disease, Fabry's disease, diabetic nephropathy, chronic glomerulonephritis, and nephritis associated with systemic lupus), cutis keloid formation, progressive systemic sclerosis (PSS), primary sclerosing cholangitis (PSC), liver fibrosis, liver cirrhosis, renal fibrosis, pulmonary fibrosis, cystic fibrosis, chronic graft versus host disease, scleroderma (local and systemic), Grave's opthalmopathy, diabetic retinopathy, glaucoma, Peyronie's disease, penis fibrosis, urethrostenosis after the test using a cystoscope, inner accretion after surgery, scarring, myelofibrosis, idiopathic retroperitoneal fibrosis, peritoneal fibrosis from a known etiology, drug-induced ergotism, fibrosis incident to benign or malignant cancer, fibrosis incident to microbial infection (e.g., viral, bacterial, parasitic, and fungal), Alzheimer's disease, fibrosis incident to inflammatory bowel disease (including stricture formation in Crohn's disease and microscopic colitis), fibrosis induced by chemical or environmental insult (e.g., cancer chemotherapy, pesticides, and radiation (e.g., cancer radiotherapy)).

[0332] In some examples, an effective amount of a protease-resistant IFN-α polypeptide is an amount that, when administered to an individual having a fibrotic disorder, is effective to reduce fibrosis or reduce the rate of progression of fibrosis by at least about 10%, at least about 15%, at least about 20%, at least about 25%, at least about 30%, at least about 35%, at least about 40%, at least about 45%, or at least about 50%, or more, compared with the degree of fibrosis in the individual prior to treatment or compared to the rate of progression of fibrosis that would have been experienced by the patient in the absence of treatment.

[0333] In some examples, an effective amount of a protease-resistant IFN-α polypeptide is an amount that, when administered to an individual having a fibrotic disorder, is effective to increase, or to reduce the rate of deterioration of, at least one function of the organ affected by fibrosis (e.g., lung, liver, or kidney) by at least about 10%, at least about 15%, at least about 20%, at least about 25%, at least about 30%, at least about 35%, at least about 40%, at least about 45%, or at least about 50%, or more, compared to the basal level of organ function in the individual prior to treatment or compared to the rate of deterioration in organ function that would have been experienced by the individual in the absence of treatment.

[0334] Methods of measuring the extent of fibrosis in a given organ, and methods of measuring the function of any given organ, are well known in the art.

[0335] i. Idiopathic Pulmonary Fibrosis

[0336] Methods of treating idiopathic pulmonary fibrosis (IPF) are provided. The methods generally involve administering to an individual having IPF an effective amount of a protease-resistant IFN-α polypeptide in an oral dosage formulation provided.

[0337] In some examples, a diagnosis of IPF is confirmed by the finding of usual interstitial pneumonia (UIP) on histopathological evaluation of lung tissue obtained by surgical biopsy. The criteria for a diagnosis of IPF are known. Ryu et al. (1998) Mayo Clin. Proc. 73:1085-1101.

[0338] In other examples, a diagnosis of IPF is a definite or probable IPF made by high resolution computer tomography (HRCT). In a diagnosis by HRCT, the presence of the following characteristics is noted: (1) presence of reticular abnormality and/or traction bronchiectasis with basal and peripheral predominance; (2) presence of honeycombing with basal and peripheral predominance; and (3) absence of atypical features such as micronodules, peribronchovascular nodules, consolidation, isolated (non-honeycomb) cysts, ground glass attenuation (or, if present, is less extensive than reticular opacity), and mediastinal adenopathy (or, if present, is not extensive enough to be visible on chest x-ray). A diagnosis of definite IPF is made if characteristics (1), (2), and (3) are met. A diagnosis of probable IPF is made if characteristics (1) and (3) are met.

[0339] In some examples, an “effective amount” of a protease-resistant IFN-α polypeptide is a dosage that is effective to decrease disease progression by at least about 10%, at least about 15%, at least about 20%, at least about 25%, at least about 30%, at least about 35%, at least about 40%, at least about 45%, at least about 50%, at least about 55%, at least about 60%, at least about 65%, at least about 70%, or more, compared with a placebo control or an untreated control.

[0340] Disease progression is the occurrence of one or more of the following: (1) a decrease in predicted FVC of 10% or more; (2) an increase in A-a gradient of 5 mm Hg or more; (3) a decrease of 15% of more in single breath DLc. Whether disease progression has occurred is determined by measuring one or more of these parameters on two consecutive occasions 4 to 14 weeks apart, and comparing the value to baseline.

[0341] Thus, for example, where an untreated or placebo-treated individual exhibits a 50% decrease in FVC over a period of time, an individual administered with an effective amount of a protease-resistant IFN-α polypeptide exhibits a decrease in FVC of 45%, about 42%, about 40%, about 37%, about 35%, about 32%, about 30%, or less, over the same time period.

[0342] In some examples, an “effective amount” of a protease-resistant IFN-α polypeptide is a dosage that is effective to increase progression-free survival time, e.g., the time from baseline (e.g., a time point from 1 day to 28 days before beginning of treatment) to death or disease progression is increased by at least about 10%, at least about 20%, at least about 25%, at least about 30%, at least about 40%, at least about 50%, at least about 60%, at least about 70%, at least about 80%, at least about 90%, at least about 2-fold, at least about 3-fold, at least about 4-fold, at least about 5-fold, or more, compared a placebo-treated or an untreated control individual. Thus, for example, in some examples an effective amount of a subject a protease-resistant IFN-α polypeptide is a dosage that is effective to increase the progression-free survival time by at least about 1 week, at least about 2 weeks, at least about 3 weeks, at least about 4 weeks, at least about 2 months, at least about 3 months, at least about 4 months, at least about 5 months, at least about 6 months, at least about 8 months, at least about 10 months, at least about 12 months, at least about 18 months, at least about 2 years, at least about 3 years, or longer, compared to a placebo-treated or untreated control.

[0343] In some examples, an effective amount of a protease-resistant IFN-α polypeptide is a dosage that is effective to increase at least one parameter of lung function, e.g., an effective amount of a protease-resistant IFN-α polypeptide increases at least one parameter of lung function by at least about 10%, at least about 20%, at least about 25%, at least about 30%, at least about 40%, at least about 50%, at least about 60%, at least about 70%, at least about 80%, at least about 90%, at least about 2-fold, at least about 3-fold, at least about 4-fold, at least about 5-fold, or more, compared to an untreated individual or a placebo-treated control individual. In some of these examples, a determination of whether a parameter of lung function is increased is made by comparing the baseline value with the value at any time point after the beginning of treatment, e.g., 48 weeks after the beginning of treatment, or between two time points, e.g., about 4 to about 14 weeks apart, after the beginning of treatment.

[0344] In some examples, an effective amount of a protease-resistant IFN-α polypeptide is a dosage that is effective to increase the FVC by at least about 10% at least about 20%, at least about 25%, at least about 30%, at least about 40%, at least about 50%, at least about 60%, at least about 70%, at least about 80%, at least about 90%, at least about 2-fold, at least about 3-fold, at least about 4-fold, at least about 5-fold, or more compared to baseline on two consecutive occasions 4 to 14 weeks apart.

[0345] In some of these examples, an effective amount of a protease-resistant IFN-α polypeptide is a dosage that results in a decrease in alveolar:arterial (A-a) gradient of at least about 5 mm Hg, at least about 7 mm Hg, at least about 10 mm Hg, at least about 12 mm Hg, at least about 15 mm Hg, or more, compared to baseline.

[0346] In some of these examples, an effective amount of a protease-resistant IFN-α polypeptide is a dosage that increases the single breath DL_{co} by at least about 15%, at least about 20%, at least about 30%, at least about 40%, at least about 50%, at least about 60%, at least about 70%, at least about 80%, at least about 90%, at least about 2-fold, at least about 3-fold, at least about 4-fold, at least about 5-fold, or more, compared to baseline. DL_{co} is the lung diffusing capacity for carbon monoxide, and is expressed as mL CO/mm Hg/second.

[0347] Parameters of lung function include, but are not limited to, forced vital capacity (FVC); forced expiratory volume (FEV₁); total lung capacity; partial pressure of arterial oxygen at rest; partial pressure of arterial oxygen at maximal exertion. Lung function can be measured using any known method, including, but not limited to spirometry.

[0348] ii. Liver Fibrosis

[0349] Methods are provided for treating liver fibrosis, including reducing clinical liver fibrosis, reducing the likelihood that liver fibrosis will occur, and reducing a parameter associated with liver fibrosis. The methods generally involve administering an effective amount of a protease-resistant IFN-α polypeptide in an oral dosage formulation provided to an individual in need thereof. Of particular interest in many examples is treatment of humans.

[0350] Liver fibrosis is a precursor to the complications associated with liver cirrhosis, such as portal hypertension, progressive liver insufficiency, and hepatocellular carcinoma. A reduction in liver fibrosis thus reduces the incidence of such complications. Accordingly, methods are provided for reducing the likelihood that an individual will develop complications associated with cirrhosis of the liver.

[0351] The present methods generally involve administering a therapeutically effective amount of a protease-resistant IFN-α polypeptide in an oral dosage formulation. In some examples, an “effective amount” of a protease-resistant IFN-α polypeptide is an amount that is effective in reducing liver fibrosis or reduce the rate of progression of liver fibrosis; and/or that is effective in reducing the likelihood that an individual will develop liver fibrosis; and/or that is effective in reducing a parameter associated with liver fibrosis; and/or that is effective in reducing a disorder associated with cirrhosis of the liver.

[0352] Methods are provided for treatment of liver fibrosis in an individual by administering to a subject an amount of a protease-resistant IFN-α polypeptide that is effective for prophylaxis or therapy of liver fibrosis in the individual, e.g., increasing the probability of survival, reducing the risk of death, ameliorating the disease burden or slowing the progression of disease in the individual.

[0353] Whether treatment with a protease-resistant IFN-α polypeptide is effective in reducing liver fibrosis is determined by any of a number of well-established techniques for measuring liver fibrosis and liver function. Whether liver fibrosis is reduced is determined by analyzing a liver biopsy sample. An analysis of a liver biopsy includes assessments of two major components: necroinflammation assessed by “grade” as a measure of the severity and ongoing disease activity, and the lesions of fibrosis and parenchymal or vascular remodeling as assessed by “stage” as being reflective of long-term disease progression. See, e.g., Brunt (2000) Hepatol. 31:241-246; and METAVIR (1994) Hepatology 20:15-20. Based on analysis of the liver biopsy, a score is assigned. A number of standardized scoring systems exist which provide a quantitative assessment of the degree and severity of fibrosis. These include the METAVIR, Knodell, Scheuer, Ludwig, and Ishak scoring systems.

[0354] The METAVIR scoring system is based on an analysis of various features of a liver biopsy, including fibrosis (portal fibrosis, centrilobular fibrosis, and cirrhosis); necrosis (piecemeal and lobular necrosis, acidophilic retraction, and ballooning degeneration); inflammation (portal tract inflammation, portal lymphoid aggregates, and distribution of portal inflammation); bile duct changes; and the Knodell index (scores of periportal necrosis, lobular necrosis, portal inflammation, fibrosis, and overall disease activity). The definitions of each stage in the METAVIR system are as follows: score: 0, no fibrosis; score: 1, stellate enlargement of portal tract but without septa formation; score: 2, enlargement of portal tract with rare septa formation; score: 3, numerous septa without cirrhosis; and score: 4, cirrhosis.

[0355] Knodell's scoring system, also called the Hepatitis Activity Index, classifies specimens based on scores in four categories of histologic features: I. Periportal and/or bridging necrosis; II. Intralobular degeneration and focal necrosis; III. Portal inflammation; and IV. Fibrosis. In the Knodell staging system, scores are as follows: score: 0, no fibrosis; score: 1, mild fibrosis (fibrous portal expansion); score: 2, moderate fibrosis; score: 3, severe fibrosis (bridging fibrosis); and score: 4, cirrhosis. The higher the score, the more severe the liver tissue damage. Knodell (1981) Hepatol. 1:431.

[0356] In the Scheuer scoring system scores are as follows: score: 0, no fibrosis; score: 1, enlarged, fibrotic portal tracts; score: 2, periportal or portal-portal septa, but intact architecture; score: 3, fibrosis with architectural distortion, but no obvious cirrhosis; score: 4, probable or definite cirrhosis. Scheuer (1991) J. Hepatol. 13:372.

[0357] The Ishak scoring system is described in Ishak (1995) J. Hepatol. 22:696-699. Stage 0, No fibrosis; Stage 1, Fibrous expansion of some portal areas, with or without short fibrous septa; stage 2, Fibrous expansion of most portal areas, with or without short fibrous septa; stage 3, Fibrous expansion of most portal areas with occasional portal to portal (P-P) bridging; stage 4, Fibrous expansion of portal areas with marked bridging (P-P) as well as portal-central (P-C); stage 5, Marked bridging (P-P and/or P-C) with occasional nodules (incomplete cirrhosis); stage 6, Cirrhosis, probable or definite. The benefit of anti-fibrotic therapy also can be measured and assessed by using the Child-Pugh scoring system is a multicomponent point system based upon abnormalities in serum bilirubin level, serum albumin level, prothrombin time, the presence and severity of ascites, and the presence and severity of encephalopathy. Based upon the presence and severity of abnormality of these parameters, patients can be placed in one of three categories of increasing severity of clinical disease: A, B, or C.

[0358] In some examples, a therapeutically effective amount of a protease-resistant IFN-α polypeptide is an amount that effects a change of one unit or more in the fibrosis stage based on pre- and post-therapy liver biopsies. In particular examples, a therapeutically effective amount of a protease-resistant IFN-α polypeptide reduces liver fibrosis by at least one unit in the METAVIR, the Knodell, the Scheuer, the Ludwig, or the Ishak scoring system.

[0359] Secondary, or indirect, indices of liver function also can be used to evaluate the efficacy of treatment with a protease-resistant IFN-α polypeptide. Morphometric computerized semi-automated assessment of the quantitative degree of liver fibrosis based upon specific staining of collagen and/or serum markers of liver fibrosis also can be measured as an indication of the efficacy of a subject treatment method. Secondary indices of liver function include, but are not limited to, serum transaminase levels, prothrombin time, bilirubin, platelet count, portal pressure, albumin level, and assessment of the Child-Pugh score.

[0360] In another example, an effective amount of a protease-resistant IFN-α polypeptide is an amount that is effective to increase an index of liver function by at least about 10%, at least about 20%, at least about 25%, at least about 30%, at least about 35%, at least about 40%, at least about 45%, at least about 50%, at least about 55%, at least about 60%, at least about 65%, at least about 70%, at least about 75%, or at least about 80%, or more, compared to the index of liver function in an untreated individual, or in a placebo-treated individual. Those skilled in the art can readily measure such indices of liver function, using standard assay methods, many of which are commercially available, and are used routinely in clinical settings.

[0361] Serum markers of liver fibrosis also can be measured as an indication of the efficacy of a subject treatment method. Serum markers of liver fibrosis include, but are not limited to, hyaluronate, N-terminal procollagen III peptide, 7S domain of type IV collagen, C-terminal procollagen I peptide, and laminin. Additional biochemical markers of liver fibrosis include .alpha.-2-macroglobulin, haptoglobin, gamma globulin, apolipoprotein A, and gamma glutamyl transpeptidase.

[0362] In another example, a therapeutically effective amount of a protease-resistant IFN-α polypeptide is an amount that is effective to reduce a serum level of a marker of liver fibrosis by at least about 10%, at least about 20%, at least about 25%, at least about 30%, at least about 35%, at least about 40%, at least about 45%, at least about 50%, at least about 55%, at least about 60%, at least about 65%, at least about 70%, at least about 75%, or at least about 80%, or more, compared to the level of the marker in an untreated individual, or in a placebo-treated individual. Those skilled in the art can readily measure such serum markers of liver fibrosis, using standard assay methods, many of which are commercially available, and are used routinely in clinical settings. Methods of measuring serum markers include immunological-based methods, e.g., enzyme-linked immunosorbent assays (ELISA), radioimmunoassays, using antibody specific for a given serum marker.

[0363] Quantitative tests of functional liver reserve also can be used to assess the efficacy of treatment with a protease-resistant IFN-α polypeptide. These include: indocyanine green clearance (ICG), galactose elimination capacity (GEC), aminopyrine breath test (ABT), antipyrine clearance, monoethylglycine-xylidide (MEG-X) clearance, and caffeine clearance.

[0364] As used herein, a “complication associated with cirrhosis of the liver” refers to a disorder that is a sequelae of decompensated liver disease, i.e., or occurs subsequently to and as a result of development of liver fibrosis, and includes, but it not limited to, development of ascites, variceal bleeding, portal hypertension, jaundice, progressive liver insufficiency, encephalopathy, hepatocellular carcinoma, liver failure requiring liver transplantation, and liver-related mortality.

[0365] In another example, a therapeutically effective amount of a protease-resistant IFN-α polypeptide is an amount that is effective in reducing the incidence (e.g., the likelihood that an individual will develop) of a disorder associated with cirrhosis of the liver by at least about 10%, at least about 20%, at least about 25%, at least about 30%, at least about 35%, at least about 40%, at least about 45%, at least about 50%, at least about 55%, at least about 60%, at least about 65%, at least about 70%, at least about 75%, or at least about 80%, or more, compared to an untreated individual, or in a placebo-treated individual.

[0366] Whether therapy with a protease-resistant IFN-α polypeptide is effective in reducing the incidence of a disorder associated with cirrhosis of the liver can readily be determined by those skilled in the art.

[0367] Reduction in liver fibrosis increases liver function. Thus, methods are provided for increasing liver function, generally involving administering a therapeutically effective amount of a protease-resistant IFN-α polypeptide. Liver functions include, but are not limited to, synthesis of proteins such as serum proteins (e.g., albumin, clotting factors, alkaline phosphatase, aminotransferases (e.g., alanine transaminase, aspartate transaminase), 5′-nucleosidase, .gamma.-glutaminyltranspeptidase, etc.), synthesis of bilirubin, synthesis of cholesterol, and synthesis of bile acids; a liver metabolic function, including, but not limited to, carbohydrate metabolism, amino acid and ammonia metabolism, hormone metabolism, and lipid metabolism; detoxification of exogenous drugs; a hemodynamic function, including splanchnic and portal hemodynamics.

[0368] Whether a liver function is increased is readily ascertainable by those skilled in the art, using well-established tests of liver function. Thus, synthesis of markers of liver function such as albumin, alkaline phosphatase, alanine transaminase, aspartate transaminase and bilirubin, can be assessed by measuring the level of these markers in the serum, using standard immunological and enzymatic assays. Splanchnic circulation and portal hemodynamics can be measured by portal wedge pressure and/or resistance using standard methods. Metabolic functions can be measured by measuring the level of ammonia in the serum.

[0369] Whether serum proteins normally secreted by the liver are in the normal range can be determined by measuring the levels of such proteins, using standard immunological and enzymatic assays. Those skilled in the art know the normal ranges for such serum proteins. The following are non-limiting examples. The normal range of alanine transaminase is from about 7 to about 56 units per liter of serum. The normal range of aspartate transaminase is from about 5 to about 40 units per liter of serum. Bilirubin is measured using standard assays. Normal bilirubin levels are usually less than about 1.2 mg/dL. Serum albumin levels are measured using standard assays. Normal levels of serum albumin are in the range of from about 35 to about 55 g/L. Prolongation of prothrombin time is measured using standard assays. Normal prothrombin time is less than about 4 seconds longer than control.

[0370] In another example, a therapeutically effective amount of a protease-resistant IFN-α polypeptide is an amount that is effective to increase liver function by at least about 10%, at least about 20%, at least about 30%, at least about 40%, at least about 50%, at least about 60%, at least about 70%, at least about 80%, or more. For example, a therapeutically effective amount of a protease-resistant IFN-α polypeptide is an amount that is effective to reduce an elevated level of a serum marker of liver function by at least about 10%, at least about 20%, at least about 30%, at least about 40%, at least about 50%, at least about 60%, at least about 70%, at least about 80%, or more, or to reduce the level of the serum marker of liver function to within a normal range. A therapeutically effective amount of a protease-resistant IFN-α polypeptide also is an amount effective to increase a reduced level of a serum marker of liver function by at least about 10%, at least about 20%, at least about 30%, at least about 40%, at least about 50%, at least about 60%, at least about 70%, at least about 80%, or more, or to increase the level of the serum marker of liver function to within a normal range.

[0371] iii. Renal Fibrosis

[0372] The present methods are provided for treating renal fibrosis. The methods generally involve administering to an individual having renal fibrosis, or at risk of having renal fibrosis, an effective amount of a protease-resistant IFN-α polypeptide in an oral dosage formulation. In some examples, an “effective amount” of a protease-resistant IFN-α polypeptide that is effective in reducing renal fibrosis; and/or that is effective in reducing the likelihood that an individual will develop renal fibrosis; and/or that is effective in reducing a parameter associated with renal fibrosis; and/or that is effective in reducing a disorder associated with fibrosis of the kidney.

[0373] In one example, an effective amount of a protease-resistant IFN-α polypeptide is an amount that is sufficient to reduce renal fibrosis, or reduce the rate of progression of renal fibrosis, by at least about 10%, at least about 15%, at least about 20%, at least about 25%, at least about 30%, at least about 35%, at least about 40%, at least about 45%, at least about 50%, compared to the degree of renal fibrosis in the individual prior to treatment, or compared to the rate of progression of renal fibrosis that would have been experienced by the patient in the absence of treatment.

[0374] Whether fibrosis is reduced in the kidney is determined using any known method. For example, histochemical analysis of kidney biopsy samples for the extent of extracellular matrix (ECM) deposition and/or fibrosis is performed. Other methods are known in the art. See, e.g., Masseroli et al. (1998) Lab. Invest. 78:511-522; U.S. Pat. No. 6,214,542.

[0375] In some examples, an effective amount of a protease-resistant IFN-α polypeptide is an amount that is effective to increase kidney function by at least about 10%, at least about 15%, at least about 20%, at least about 25%, at least about 30%, at least about 35%, at least about 40%, at least about 45%, at least about 50%, compared to the basal level of kidney function in the individual prior to treatment.

[0376] In some examples, an effective amount of a protease-resistant IFN-α polypeptide is an amount that is effective to slow the decline in kidney function by at least about 10%, at least about 15%, at least about 20%, at least about 25%, at least about 30%, at least about 35%, at least about 40%, at least about 45%, at least about 50%, compared to the decline in kidney function that would occur in the absence of treatment.

[0377] Kidney function can be measured using any known assay, including, but not limited to, plasma creatinine level (where normal levels are generally in a range of from about 0.6 to about 1.2 mg/dL); creatinine clearance (where the normal range for creatinine clearance is from about 97 to about 137 mL/minute in men, and from about 88 to about 128 mL/minute in women); the glomerular filtration rate (either calculated or obtained from inulin clearance or other methods), blood urea nitrogen (where the normal range is from about 7 to about 20 mg/dL); and urine protein levels.

[0378] b. Cancer

[0379] Methods are provided for treating a proliferative disorder (e.g., cancer), the method generally involving administering to an individual in need thereof an effective amount of a protease-resistant IFN-α polypeptide in an oral dosage formulation provided, wherein the protease-resistant IFN-α polypeptide is prepared as described above.

[0380] The methods are effective to reduce the growth rate of a tumor by at least about 5%, at least about 10%, at least about 20%, at least about 25%, at least about 50%, at least about 75%, at least about 85%, or at least about 90%, up to total inhibition of growth of the tumor, when compared to a suitable control. Thus, in these examples, an “effective amount” of a protease-resistant IFN-α polypeptide is an amount that is sufficient to reduce tumor growth rate by at least about 5%, at least about 10%, at least about 20%, at least about 25%, at least about 50%, at least about 75%, at least about 85%, or at least about 90%, up to total inhibition of tumor growth, when compared to a suitable control. In an experimental animal system, a suitable control can be a genetically identical animal not treated with oral dosage formulation of the protease-resistant IFN-α polypeptide. In non-experimental systems, a suitable control can be the tumor load present before administering the dosage form of the protease-resistant IFN-α polypeptide. Other suitable controls can be a placebo control.

[0381] Whether growth of a tumor is inhibited can be determined using any known method, including, but not limited to, a proliferation assay wherein the number of cells in an in vitro cell culture is measured after a period of time, where the cells are-cultured in the presence or the absence of the composition and a ³H-thymidine uptake assay.

[0382] The methods are useful for treating a wide variety of cancers, including carcinomas, sarcomas, leukemias, and lymphomas.

[0383] Carcinomas that can be treated using a subject method include, but are not limited to, esophageal carcinoma, hepatocellular carcinoma, basal cell carcinoma (a form of skin cancer), squamous cell carcinoma (various tissues), bladder carcinoma, including transitional cell carcinoma (a malignant neoplasm of the bladder), bronchogenic carcinoma, colon carcinoma, colorectal carcinoma, gastric carcinoma, lung carcinoma, including small cell carcinoma and non-small cell carcinoma of the lung, adrenocortical carcinoma, thyroid carcinoma, pancreatic carcinoma, breast carcinoma, ovarian carcinoma, prostate carcinoma, adenocarcinoma, sweat gland carcinoma, sebaceous gland carcinoma, papillary carcinoma, papillary adenocarcinoma, cystadenocarcinoma, medullary carcinoma, renal cell carcinoma, ductal carcinoma in situ or bile duct carcinoma, choriocarcinoma, seminoma, embryonal carcinoma, Wilm's tumor, cervical carcinoma, uterine carcinoma, testicular carcinoma, osteogenic carcinoma, epithelieal carcinoma, and nasopharyngeal carcinoma, etc.

[0384] Sarcomas that can be treated using a subject method include, but are not limited to, fibrosarcoma, myxosarcoma, liposarcoma, chondrosarcoma, chordoma, osteogenic sarcoma, osteosarcoma, angiosarcoma, endotheliosarcoma, lymphangiosarcoma, lymphangioendotheliosarcoma, synovioma, mesothelioma, Ewing's sarcoma, leiomyosarcoma, rhabdomyosarcoma, and other soft tissue sarcomas.

[0385] Other solid tumors that can be treated using a subject method include, but are not limited to, glioma, astrocytoma, medulloblastoma, craniopharyngioma, ependymoma, pinealoma, hemangioblastoma, acoustic neuroma, oligodendroglioma, menangioma, melanoma, neuroblastoma, and retinoblastoma.

[0386] Leukemias that can be treated using a subject method include, but are not limited to, a) chronic myeloproliferative syndromes (neoplastic disorders of multipotential hematopoietic stem cells); b) acute myelogenous leukemias (neoplastic transformation of a multipotential hematopoietic stem cell or a hematopoietic cell of restricted lineage potential; c) chronic lymphocytic leukemias (CLL; clonal proliferation of immunologically immature and functionally incompetent small lymphocytes), including B-cell CLL, T-cell CLL prolymphocytic leukemia, and hairy cell leukemia; and d) acute lymphoblastic leukemias (characterized by accumulation of lymphoblasts). Lymphomas that can be treated using a subject method include, but are not limited to, B-cell lymphomas (e.g., Burkitt's lymphoma) and Hodgkin's lymphoma.

[0387] c. Viral Infections

[0388] Methods are provided for treating a virus infection, and methods of reducing viral load, or reducing the time to viral clearance, or reducing morbidity or mortality in the clinical outcomes, in patients suffering from a virus infection. Methods are provided for reducing the risk that an individual will develop a pathological viral infection that has clinical sequelae. The methods generally involve administering a therapeutically effective amount of a protease-resistant IFN-α polypeptide for the treatment of a virus infection, wherein the protease-resistant IFN-α polypeptide is prepared as described above.

[0389] In some examples, the IFN-α polypeptide can be administered prophylactically. Where a subject treatment method is prophylactic, the methods reduce the risk that an individual will develop pathological infection with a virus. An effective amount of a protease-resistant IFN-α polypeptide in an oral dosage formulation is an amount that reduces the risk or reducing the probability that an individual will develop a pathological infection with a virus. For example, an effective amount reduces the risk that an individual will develop a pathological infection by at least about 10%, at least about 20%, at least about 25%, at least about 30%, at least about 35%, at least about 40%, at least about 50%, at least about 60%, at least about 70%, at least about 80%, at least about 90%, or more, compared to the risk of developing a pathological infection with the virus in the absence of treatment with an oral dosage formulation of a protease-resistant IFN-α polypeptide.

[0390] In some examples, an effective amount of a protease-resistant IFN-α polypeptide in an oral dosage formulation is an amount that reduces viral load by at least about 10%, at least about 20%, at least about 25%, at least about 30%, at least about 35%, at least about 40%, at least about 50%, at least about 60%, at least about 70%, at least about 80%, at least about 90%, or more, compared to the viral load in the absence of treatment with an oral dosage formulation of a protease-resistant IFN-α polypeptide.

[0391] In some examples, an effective amount of a protease-resistant IFN-α polypeptide in an oral dosage formulation is an amount that that reduces the time to viral clearance, by at least about 10%, at least about 20%, at least about 25%, at least about 30%, at least about 35%, at least about 40%, at least about 50%, at least about 60%, at least about 70%, at least about 80%, at least about 90%, or more, compared to the time to viral clearance in the absence of treatment.

[0392] In some examples, an effective amount of a protease-resistant IFN-α polypeptide in an oral dosage formulation is an amount that reduces morbidity or mortality due to a virus infection by at least about 10%, at least about 20%, at least about 25%, at least about 30%, at least about 35%, at least about 40%, at least about 50%, at least about 60%, at least about 70%, at least about 80%, at least about 90%, or more, compared to the morbidity or mortality in the absence of treatment.

[0393] Whether a subject treatment method is effective in reducing the risk of a pathological virus infection, reducing viral load, reducing time to viral clearance, or reducing morbidity or mortality due to a virus infection is readily determined by those skilled in the art. Viral load is readily measured by measuring the titer or level of virus in serum. The number of virus in the serum can be determined using any known assay, including, e.g., a quantitative polymerase chain reaction assay using oligonucleotide primers specific for the virus being assayed. Whether morbidity is reduced can be determined by measuring any symptom associated with a virus infection, including, e.g., fever, respiratory symptoms (e.g., cough, ease or difficulty of breathing).

[0394] In some examples, methods are provided for reducing viral load, and/or reducing the time to viral clearance, and/or reducing morbidity or mortality in an individual who has been exposed to a virus (e.g., an individual who has come into contact with an individual infected with a virus), the method involving administering an effective amount of a protease-resistant IFN-α polypeptide in an oral dosage formulation. In these examples, therapy is begun from about 1 hour to about 14 days following exposure, e.g., from about 1 hour to about 24 hours, from about 24 hours to about 48 hours, from about 48 hours to about 3 days, from about 3 days to about 4 days, from about 4 days to about 7 days, from about 7 days to about 10 days, or from about 10 days to about 14 days following exposure to the virus.

[0395] In some examples, methods are provided for reducing the risk that an individual who has been exposed to a virus (e.g., an individual who has come into contact with an individual infected with a virus) will develop a pathological virus infection with clinical sequelae, the method involving administering an effective amount of a protease-resistant IFN-α polypeptide in an oral dosage formulation. In these examples, therapy is begun from about 1 hour to about 35 days following exposure, e.g., from about 1 hour to about 24 hours, from about 24 hours to about 48 hours, from about 48 hours to about 3 days, from about 3 days to about 4 days, from about 4 days to about 7 days, from about 7 days to about 10 days, from about 10 days to about 14 days, from about 14 days to about 21 days, or from about 21 days to about 35 days following exposure to the virus.

[0396] In some examples, methods are provided for reducing viral load, and/or reducing the time to viral clearance, and/or reducing morbidity or mortality in an individual who may or may not have been infected with a virus, and who has been exposed to a virus. In some of these examples, the methods involve administering an effective amount of a protease-resistant IFN-α polypeptide in an oral dosage formulation within 24 hours of exposure to the virus.

[0397] In some examples, methods are provided for reducing viral load, and/or reducing the time to viral clearance, and/or reducing morbidity or mortality in an individual who has not been infected with a virus, and who has been exposed to a virus. In some of these examples, the methods involve administering an effective amount of a protease-resistant IFN-α polypeptide in an oral dosage formulation within 48 hours of exposure to the virus. In other examples, the methods involve administering a protease-resistant IFN-α polypeptide in an oral dosage formulation more than 48 hours after exposure to the virus, e.g., from 72 hours to about 35 days, e.g., 72 hours, 4 days, 5 days, 6 days, or 7 days after exposure, or from about 7 days to about 10 days, from about 10 days to about 14 days, from about 14 days to about 17 days, from about 17 days to about 21 days, from about 21 days to about 25 days, from about 25 days to about 30 days, or from about 30 days to about 35 days after exposure to the virus.

[0398] In some examples, methods are provided for reducing the risk that an individual who has been exposed to a virus will develop a pathological virus infection with clinical sequelae. In some of these examples, the methods involve administering an effective amount of a protease-resistant IFN-α polypeptide in an oral dosage formulation within 24 hours of exposure to the virus.

[0399] In some examples, methods are provided for reducing the risk that an individual who has been exposed to a virus (e.g., an individual who has come into contact with an individual infected with a virus) will develop a pathological viral infection with clinical sequelae. In some of these examples, the methods involve administering an effective amount of a protease-resistant IFN-α polypeptide in an oral dosage formulation within 48 hours of exposure to the virus.

[0400] i. Hepatitis Virus Infection

[0401] HCV is exemplary of viral infections treated by IFN-α administration. Methods are provided for treating a hepatitis virus infection. In particular examples, methods are provided for treating a hepatitis C virus (HCV) infection; methods of reducing the incidence of complications associated with HCV and cirrhosis of the liver; and methods of reducing viral load, or reducing the time to viral clearance, or reducing morbidity or mortality in the clinical outcomes, in patients suffering from HCV infection. The methods generally involve administering to the individual an effective amount of a protease-resistant IFN-α polypeptide in an oral dosage formulation.

[0402] The methods decrease viral load in the individual, and to achieve a sustained viral response. Optionally, the subject method further provides administering to the individual an effective amount of a nucleoside analog, such as ribavirin, levovirin, isatoribine and viramidine. Of particular interest in many examples is treatment of humans.

[0403] Whether a method is effective in treating an HCV infection can be determined, for example, by measuring viral load, or by measuring a parameter associated with HCV infection, including, but not limited to, liver fibrosis, elevations in serum transaminase levels, and necroinflammatory activity in the liver. Indicators of liver fibrosis are discussed in detail below.

[0404] Viral load can be measured by measuring the titer or level of virus in serum. These methods include, but are not limited to, a quantitative polymerase chain reaction (PCR) and a branched DNA (bDNA) test. Quantitative assays for measuring the viral load (titer) of HCV RNA have been developed. Many such assays are available commercially, including a quantitative reverse transcription PCR (RT-PCR) (Amplicor HCV Monitor™, Roche Molecular Systems, New Jersey); and a branched DNA (deoxyribonucleic acid) signal amplification assay (Quantiplex™ HCV RNA Assay (bDNA), Chiron Corp., Emeryville, Calif.). See, e.g., Gretch et al. (1995) Ann. Intern. Med. 123:321-329. Also of interest is a nucleic acid test (NAT), developed by Qen-Probe Inc. (San Diego) and Chiron Corporation, and sold by Chiron Corporation under the trade name Procleix®, which NAT simultaneously tests for the presence of HIV-1 and HCV. See, e.g., Vargo et al. (2002) Transfusion 42:876-885.

[0405] In general, an effective amount of a protease-resistant IFN-α polypeptide in an oral dosage from is an amount that is effective to reduce viral load to undetectable levels, e.g., to less than about 5000, less than about 1000, less than about 500, or less than about 200 genome copies/mL serum. In some examples, an effective amount of a subject agent is an amount that is effective to reduce viral load to less than 100 genome copies/mL serum. In many examples, the methods provided achieve a sustained viral response, e.g., the viral load is reduced to undetectable levels for a period of at least about one month, at least about two months, at least about three months, at least about four months, at least about five months, or at least about six months following cessation of treatment.

[0406] Whether a subject method is effective in treating an HCV infection can be determined by measuring a parameter associated with HCV infection, such as liver fibrosis. Methods of determining the extent of liver fibrosis are discussed in detail below. In some examples, the level of a serum marker of liver fibrosis indicates the degree of liver fibrosis.

[0407] As one non-limiting example, levels of serum alanine aminotransferase (ALT) are measured, using standard assays. In general, an ALT level of less than about 45 international units is considered normal. In some examples, an effective amount of a protease-resistant IFN-α polypeptide in an oral dosage formulation for treatment of an HCV infection is an amount effective to reduce ALT levels to less than about 45 U/ml serum.

[0408] 2. Treatment Methods Using Growth Hormone

[0409] In one example, the oral dosage formulation of a protease-resistant polypeptide is administered to a patient who has a disease, disorder, or condition that can be treated by administration of a growth hormone (GH) polypeptide. Typically, formulations of protease-resistant GH polypeptides provided herein are administered orally using an amount of a GH that is generally about or 6-400 times, such as 10-100 times, including, for example, 15-50 times, 20-30 times, typically 15-40 times higher per day, than amounts that are administered subcutaneously for the same indication that that can be prevented or treated by administration an unmodified therapeutic protein in the same individual.

[0410] Native GH has been administered for the treatment of a growth hormone deficiency at a dosage of about 0.004-0.016 mg/kg/day by subcutaneous injection. Oral dosage formulations of protease-resistant growth hormone polypeptides provided herein are administered orally using an amount of growth hormone that is greater than the dosage of growth hormone for subcutaneous administration. Typically, the oral dosage formulations of protease-resistant growth hormone polypeptides provided herein are administered orally using an amount of growth hormone that is generally about or 6-400 times, such as 10-100 times, including, for example, 15-50 times, 20-30 times, typically 15-40 times higher per day, than amounts that are administered subcutaneously for treatment of a growth hormone deficiency using an unmodified therapeutic protein in the same individual.

[0411] The oral dosage formulations of protease-resistant GH polypeptides provided herein can be used for treatment of any condition for which unmodified GH is employed. This section provides exemplary uses of modified GH polypeptides and administration methods. These described therapies are exemplary and do not limit the applications of GH.

[0412] The oral dosage formulations of protease-resistant GH polypeptides provided herein are intended for use in various therapeutic, lifestyle related, as well as diagnostic methods in which GH is used for treatment. Such methods include, but are not limited to, methods of treatment of physiological and medical conditions described and listed below. By virtue of their improved stability, protease-resistant GH polypeptides provided herein exhibit improvement in the corresponding in vivo activities and therapeutic effects.

[0413] In particular, the oral dosage formulations of protease-resistant GH polypeptides are intended for use in therapeutic methods in which the natural protein has been used for treatment. Treatment of disorders can include, but are not limited to, growth deficiency disorders (including but not limited to Turner's syndrome, intrauterine growth retardation, idiopathic short stature, Prader Willi syndrome, Thalassaemia), AIDS wasting, aging, impaired immune function of HIV-infected subjects, catabolic illnesses (including those associated with respiratory failure and burn injuries), recovery from surgery, congestive cardiomyopathy, liver transplantation, liver regeneration after hepatectomy, chronic renal failure, renal osteodystrophy, osteoporosis, achondroplasia/hypochondroplasia, skeletal dysplasia, chronic inflammatory or nutritional disorders (such as Crohn's disease), short bowel syndrome, juvenile chronic arthritis, cystic fibrosis, male infertility, X-linked hypophosphatemic rickets, Down's syndrome, Spina bifida, Noonan Syndrome, obesity, impaired muscle strength and fibromyalgia. The oral dosage formulations of protease-resistant GH polypeptides also can be administered in combination with other therapies including other biologics and small molecule compounds.

[0414] In particular, the oral formulations of protease-resistant GH polypeptides also are intended for use in lifestyle related methods in which the natural protein has been used for treatment. Applications related to life-style can include, but are not limited to anti-aging, sarcopenia (age-related muscle wasting), improvement of sex drive and/or libido, improvement of body chemistry and/or metabolism, increase in muscle strength and/or mass. The oral formulations of protease-resistant GH polypeptides also can be administered in combination with other therapies including other biologics and small molecule compounds.

[0415] Treatment of diseases and conditions oral dosage formulations of protease-resistant GH polypeptides can be effected by oral administration using suitable oral dosage formulations as described herein. If necessary, a particular dosage and duration and treatment protocol can be empirically determined or extrapolated based on dosages and regimens employed for other modes of GH administration, such as subcutaneous or intravenous injections. For example, exemplary doses of recombinant and native GH polypeptides can be used as a starting point to determine appropriate dosages. Dosages provided herein for treatments and therapies with GH and recombinant forms are exemplary dosages. Such exemplary dosages, however, can provide guidance in selecting dosing regimes for oral dosage formulation of protease-resistant GH polypeptides. Since the mutant GH polypeptides provided herein exhibit increased stability, dosages and administration regimens can differ from those for the unmodified growth hormones. Particular dosages and regimens can be empirically determined.

[0416] Dosage levels are apparent to one of skill in the art and can be determined based on a variety of factors, such as body weight of the individual, general health, age, the activity of the specific compound employed, sex, diet, time of administration, rate of excretion, drug combination, the severity and course of the disease or condition, and the subject's disposition to the disease/condition and the judgment of the treating physician. The amount of active ingredient that can be combined with the carrier materials to produce a single dosage form with vary depending upon the subject treated and the particular mode of administration.

[0417] Upon improvement of a subject's condition, a maintenance dose of a compound or composition provided herein can be administered, if necessary; and the dosage, the dosage form, or frequency of administration, or a combination thereof, can be varied. In some cases, the subject can require intermittent treatment on a long-term basis upon any recurrence of disease symptoms.

[0418] a. Growth Deficiencies

[0419] The growth of an infant into an adult is a complex process involving a number of genes and hormones, as well as nutrition, diet, exercise, and rest. Growth hormone is central to growth and development, and is the principal hormone governing height in an individual. Growth hormone deficiency is a disease often caused by a problem in the pituitary gland or the hypothalamus in the brain. Growth hormone deficiency can result either when GH is not present in the pituitary gland in adequate amounts or when GH is present in adequate amounts but the hormone required to release it (GHRH) is lacking. Growth retardation is a medical condition in which the normal growth of children is slowed down or stopped, due to a deficiency in the growth hormone (GH) system.

[0420] There are two different types of GH deficiencies in children: congenital and acquired.

[0421] Congenital growth hormone deficiencies arise from problems with the pituitary gland or hypothalamus while the fetus is growing in the womb, whereas acquired growth hormone deficiencies occur when the area around the pituitary and hypothalamus is damaged in some way. In some instances, growth hormone deficiencies may not have an identifiable cause (“idiopathic”)). Such instances include Prader-Willi Syndrome (a congenital disorder that features GH deficiency and short stature), Turner's Syndrome (a genetic defect that is manifested only in girls and characterized by short stature), chronic renal insufficiency (kidney malfunction, which can often cause growth retardation in children), and Thalassaemia (an inherited condition characterized by imbalance in the synthesis of hemoglobin causing severe anemia and malformed red blood cells that can cause reduced GH secretion and short stature).

[0422] Growth deficiencies not only affect children, but also can be a significant problem for adults. GH deficiency in adults is a specific clinical syndrome with numerous physiological consequences, including, but not limited to: changes in body composition, including central obesity; lipids in the blood; muscle strength; bone composition; exercise capacity and energy; cardiovascular risk; and psychological well-being (e.g., social isolation and depression). Additionally, studies indicate that subjects with hypo-pituitarism have an increased risk of mortality from cardiovascular disease, possibly attributable to their GH deficiency. GH deficiency in adults can result from a pituitary or peri-pituitary tumor, or as a direct result of the surgery/radiation used to manage these conditions. Less commonly, GH deficiency in adults arises from a deficiency acquired in childhood.

[0423] Recombinant GH, used as therapeutic treatment for growth deficiency supplements and/or replaces GH the body should normally produce. Treatments for adults and children can include systemic administration of GH. For example, GH can be administered alone or in combination with, prior to, intermittently with, or subsequent to other treating agents. Modes of administration include, but are not limited to, GH injection.

[0424] The oral dosage formulations of protease-resistant GH polypeptides described herein can be used in growth-deficiency therapies. The protease-resistant GHs herein exhibit increased protease resistance to proteases of the gastrointestinal tract, thereby improving therapeutic efficacy of a pharmaceutical composition. Thus, oral dosage formulations of protease-resistant GH polypeptides can be used to deliver longer lasting, more stable growth-deficiency therapies. Examples of therapeutic improvements using oral dosage formulations of protease-resistant GH polypeptides include, for example, but are not limited to, lower dosages, fewer and/or less frequent administrations, decreased side effects and increased therapeutic effects.

[0425] Dosages and regimens of oral dosage formulations protease-resistant GH polypeptides provided herein can be empirically determined. Dosages for unmodified GH can be used as guidance for determining dosages for modified GH. Factors such as the level of activity and half-life of a modified GH in comparison to an unmodified GH can be used in making such determinations.

[0426] Among the goals of GH therapy for the treatment of growth deficiency is long-term replacement of GH to physiologic levels comparable to healthy persons of same sex and similar age. Dosing regimens of GH can depend upon a number of factors including, but not limited to, age of subject; pubertal status; subject tolerance and incidence of adverse effects; and the source of the GH, whether recombinant or natural. For example, the potency of recombinant GH is about one-third the potency of pituitary GH. Particular doses and dosing regimes can be determined empirically. Exemplary doses of unmodified pituitary GH can be 0.1 mg/kg/wk (0.3 IU/kg/wk); exemplary doses of recombinant unmodified GH can be 0.18 to 0.3 mg/kg/wk for children with GHD (MacGillivray et al. Pediatrics 102: 527-530 (1998)). The average dose of GH given to children with growth hormone deficiency is 0.3 mg/kg/week divided daily doses given by subcutaneous injections. Other exemplary doses in treatment of GH deficient disorders in children include 0.35 mg/kg/week for children with chronic renal insufficiency; 0.375 mg/kg/week for children with Turner's syndrome; 0.3 mg/kg/week for children with idiopathic short stature; and 0.7 mg/kg/week for children with intrauterine growth retardation (see, for example, Vance et al. The New England Journal of Medicine 341(6): 1206-1216 (1999)).

[0427] The starting dose of GH in adults is typically 0.01-0.03 mg/kg/wk by subcutaneous injection. The maximal daily dose for subjects up to 35 years of age is typically 0.18 mg/kg/wk and 0.09 mg/kg/wk for older subjects. In various treatment studies on growth hormone-replacement, the dose of unmodified growth hormone has ranged from about 0.04 to about 0.18 mg/kg/wk (see, Vance et al. The New England Journal of Medicine 341(6): 1206-1216 (1999)). Others recommend (see e.g., the Growth Hormone Research Society recommendations) a starting dose of 105-210 mg/week, regardless of body weight (see, e.g., Consensus guidelines for the diagnosis and treatment of adults with growth hormone deficiency: Summary statement of the Growth Hormone Research Society Workshop on Adults Growth Hormone Deficiency. J. Clin. Endocrinol. Metab. 83: 379-381 (1998)).

[0428] b. Cachexia

[0429] In spite of the anti-retroviral therapy, which extends the lives of people with HIV, AIDS wasting is one of the principal causes of ill health in people with HIV/AIDS. Estimates of the prevalence of AIDS wasting range from 4-30% of HIV infected individuals. Studies have demonstrated that AIDS wasting, when left untreated, is directly correlated with mortality. Similar manifestations of wasting are observed in connection with other diseases, e.g., cancers.

[0430] Dosages and regimens of oral dosage formulations protease-resistant GH polypeptides provided herein can be empirically determined. Dosages for unmodified GH can be used as guidance for determining dosages for modified GH. Factors such as the level of activity and half-life of the modified GH in comparison to the unmodified GH can be used in making such determinations. The modified GHs provided herein have increased protease resistance to proteases of the gastrointestinal tract and in turn deliver longer lasting, more stable therapeutic effects in the treatment of AIDS wasting. Recombinant GH received approval from the US FDA in 1996 for the treatment of AIDS wasting. The recommended initial adult dosage of unmodified growth hormone therapy used in the treatment of cachexia is not more than 0.04 mg/kg/week divided into six or seven subcutaneous injections. The dose can be increased at four- to eight-week intervals according to individual subject requirements up to a maximum of 0.08 mg/kg/week, depending upon subject tolerance of treatment (see package insert for Serostim®). These exemplary dosages can be used as guidance in determination of dosing regimes for modified GH polypeptides, along with additional determinations of properties and activities of modified GH compared with an unmodified form.

[0431] c. Anti-Aging

[0432] Aging is associated with a decline in gonadotropins, thyroid-stimulating hormone and pituitary function; often termed “somatopause.” Thus, as a pituitary hormone, GH also has been reported to decline with age beginning in the third decade (see, for example Corpas et al. Endocr Rev 14: 20-39 (1993)). Decreased GH is associated with many of the changes seen with aging including increasing fat, decreasing muscle mass, and decreasing bone mass. Growth hormone replacement in growth hormone-deficient older individuals can improve quality of life, enhance bone and muscle mass, and reduce cardiovascular risk.

[0433] Dosages and dosing regimens of oral dosage formulations protease-resistant GH polypeptides provided herein can be empirically determined. The initial therapeutic dose of modified GH provided herein can be determined using the guidance of the recommended initial adult dosage approved for unmodified growth hormone and then titrated according to the improved therapeutic effect resulting from the modified GH. Exemplary subcutaneous dosing of recombinant hGH therapy in male subjects aged 61 to 81 can be 0.03 mg/kg of body weight, injected three times a week in the morning; the interval between injections being either one or two days (2.6 IU per milligram of hormone) (see, for example, Rudman et al., The New England Journal of Medicine 323(1): 1-6 (1990)). Exemplary subcutaneous dosing of recombinant hGH therapy in female subjects can be 0.025 mg/kg body weight/day (Bonello et al. J. Am. Geriatr. Soc. 44(9): 1038-42 (1996)). These doses can be used along with comparisons of properties of the modified and unmodified GH polypeptides to determine dosages for the modified GH. For example, the modified GHs provided herein have increased protease resistance to proteases of the gastrointestinal tract and, in turn, deliver longer lasting, more stable anti-aging therapeutic effects. Typical subcutaneous dosages for anti-aging range from about 12-24 IU per week, depending upon the individual, age, sex and other parameters. Precise dosages can be determined empirically and adjusted based on parameters, such as measurement of levels of IGF-1. Oral dosage formulations provided should contain at least as much, typically, 15-40 times as much as a daily subcutaneous dosage for anti-aging treatment.

[0434] d. Renal Osteodystrophy

[0435] Renal osteodystrophy, which includes a variety of skeletal disorders ranging from high turnover to low turnover lesions, both leading to reduced bone mineral density and higher fracture incidences, is common in subjects with chronic renal failure. Clinical trials have shown positive effects of recombinant human GH therapy as a treatment for improving bone turnover and bone mineral density in growth hormone-deficient subjects as well as subjects with chronic renal disease on hemodialysis (see, for example, Kotzmann et al. Journal of Nephrology 17(1): 87-94 (2004)). GH, as well as IGF-1, have marked effects on bone metabolism and bone mineral density. GH can stimulate chondrocyte growth and function as well as increase, directly or indirectly, bone turnover by stimulating osteoblasts and osteoclasts and inducing collagen synthesis, thereby enhancing long bone growth.

[0436] Dosages and dosing regimens of oral dosage formulations protease-resistant GH polypeptides provided herein can be empirically determined. The initial therapeutic dose of modified GH provided herein can be determined using the guidance of the recommended initial adult dosage approved for unmodified growth hormone and then titrated according to the improved therapeutic effect resulting from the modified GH. Exemplary dosing of adult subjects with chronic renal failure on hemodialysis can be 0.125 IU/kg (40.5 μg/kg) of GH injected subcutaneously 3 times per week after each dialysis session during the first 4 weeks of treatment and 0.25 IU/kg (81 μg/kg) thereafter. The length and dosage of GH treatment can vary according to subject tolerance (see Kotzmann et al. Journal of Nephrology 17(1): 87-94 (2004)). Comparisons of properties and activities of modified GH compared to unmodified GH can be used to determine alternate dosages and dosing regimes.

[0437] e. Cystic Fibrosis

[0438] Subjects, in particular children, with cystic fibrosis have problems with poor linear growth, inadequate weight gain, and protein catabolism. Multiple studies have demonstrated improved height and weight in children treated with GH. Other studies have shown that GH treatment results in improved forced vital capacity, improved exercise tolerance and bone accumulation. Still others have found GH treatment improves clinical status as measured by decreased hospitalizations and courses of intravenous antibiotics (see, for example, Hardin D. S., Eur. J. Endocrinol. 151(Suppl 1): S81-85 (2004)).

[0439] Dosages and dosing regimens of the oral dosage formulations protease-resistant GH polypeptides provided herein can be determined empirically. For example, guidance of dosages and dosing from unmodified GH and comparison of properties and activities of modified GH with unmodified GH can be used in the determination. Exemplary dosing of pediatric subjects with cystic fibrosis includes, but is not limited to, daily subcutaneous GH injections amounting to 0.3 mg/kg/wk (see Hardin D. S., Eur. J. Endocrinol. 151(Suppl 1): S81-85 (2004)). The initial therapeutic dose of modified GH provided herein can be the recommended initial adult dose for treatments using unmodified growth hormone and thereafter titrated according to the longer lasting and improved therapeutic effects of the modified GH provided herein. The modified GHs provided herein have increased protease resistance to proteases of the gastrointestinal tract. Such modified GH can deliver longer lasting, more stable therapeutic effect in the treatment of subjects with cystic fibrosis and can allow for lower dosing and less frequent dosages.

[0440] f. Other Conditions

[0441] A number of other physiological or pathological conditions are potential targets for GH therapy. These physiological or pathological conditions include, but are not limited to, stress, decreased energy, decreased physical power, catabolic illnesses including, for example, those associated with respiratory failure and burn injuries (see for example, Hart et al. Ann. Surg. 233(6): 827-34 (2001)), recovery from surgery (see for example, Yeo et al. Growth Horm. IGF Res. 13(6): 361-70 (2003)), congestive cardiomyopathy (see for example, Adamapolous et al. Eur. Heart J. 24(24): 2186-96 (2003)), liver transplantation or liver regeneration after hepatectomy (see for example Luo et al. World J Gastroenterol. 10(9): 1292-6 (2004)), chronic inflammatory or nutritional disorders such as short bowel syndrome, Crohn's disease (see for example, Slonim et al. N. Engl. J. Med. 342(22): 1633-7 (2000)), juvenile chronic arthritis (see for example, Saha et al. J Rheumatol. 1(7): 1413-7 (2004)), male fertility disorders (see for example Ovesen et al. Fertil Steril. 66(2): 292-8 (1996)), and other disorders such as impaired immune function of HIV-infected subjects, osteoporosis, achondroplasia/hypochondroplasia, skeletal dysplasia, X-linked hypophosphatemic rickets (see for example, Seikaly et al. Pediatrics. 100(5): 879-84 (1997)), Noonan Syndrome (see for example, Noordam et al. Acta Paediatr. 90(8): 889-94 (2001)), obesity, Down's syndrome, Spina bifida, and fibromyalgia (see for example, Bennet et al. Am. J. Med. 104(3): 227-31 (1998)).

### H. COMBINATION THERAPIES

[0442] Any of the oral dosage formulations of protease-resistant polypeptides, described herein can be administered in combination with, prior to, intermittently with, or subsequent to, other therapeutic agents, therapies, or procedures including, but not limited to, other biologics, small molecule compounds and surgery. The protease-resistant therapeutics can be formulated with other active agents, particularly others for treatment of the same condition.

[0443] For any disease or condition, including all those exemplified above, for which one or more therapeutic polypeptides is indicated or has been used and for which other therapeutic agents and treatments are available, protease-resistant therapeutic polypeptides can be used in combination therewith. Hence, the oral dosage formulations of protease-resistant therapeutic polypeptides provided herein similarly can be used. Therapeutic agents, such as biologics or molecules, used in combination with the oral dosage forms provided herein can be formulated together (e.g., in the same tablet or capsule) or separately. For combinations formulated together in the same tablet or capsule, the combinations can be formulated for simultaneous release of both active ingredients or for release of active components at different time points following oral administration. Such combinations can be formulated with combinations of various coatings to effect release of the active ingredients a one or more time points. Combinations of the dosage formulations provided herein with dosage formulations or compositions containing other agents are provided. Such combinations can be provided in kits, optionally packaged with other items, such as instructions for use, syringes, vials and other items.

[0444] The biologics for the combinations can include one or more forms of the same polypeptide (e.g., native or modified, for example, by further amino acid modifications, glycosylation, pegylation, or albumation) or allelic or species variants thereof. Furthermore, combination therapies of the oral dosage formulations provided also include administration of the same polypeptide by more than one route. For example, combination therapies can include administration of the oral dosage formulation of the protease-resistant polypeptide in addition to administration of a dosage formulation of the protease-resistant polypeptide or unmodified, native, or other modified form (e.g., hyperglycosylated or pegylated) polypeptide by other mode of administration (e.g., subcutaneous intravenous or oromucosal)).

[0445] Exemplary combination therapies of oral dosage formulations of protease-resistant IFN-α polypeptides for the treatment of viral infections, such as HCV infection, include but are not limited to treatment with nucleoside analogs such as ribavirin and viramidine (prodrug of ribavirin), L-nucleosides such as levovirin, Type II interferon receptor agonists (e.g., IFN-γ), TNF antagonists (e.g., etanercept, infliximab, or adalimumab), thymosin-α, SAPK inhibitors (e.g., pirfenidone or pirfenidone analogs), amantidine, NS3 inhibitors, NS5B inhibitors, alpha-glucosidase inhibitors, or a combination thereof.

[0446] Exemplary combination therapies of oral dosage formulations provided of protease-resistant IFN-α polypeptides for the treatment of cancer include but are not limited to cytokines, chemokines, growth factors, photosensitizing agents, toxins, anti-cancer antibiotics, chemotherapeutic compounds, radionuclides, angiogenesis inhibitors, signaling modulators, anti-metabolites, anti-cancer vaccines, anti-cancer oligopeptides, mitosis inhibitor proteins, antimitotic oligopeptides, anti-cancer antibodies, immunotherapeutic agents, hyperthermia or hyperthermia therapy, radiation therapy or a combination thereof.

[0447] Exemplary combination therapies of oral dosage formulations provided of protease-resistant IFN-α polypeptides for the treatment of fibrotic disorders include combination treatment with one or more anti-fibrotic agents, including, but not limited to, a SAPK inhibitor (e.g., pirfenidone or a pirfenidone analog), TNF antagonists (e.g., etanercept, infliximab, or adalimumab), TGF-β antagonists (e.g., GLEEVEC), and endothelin receptor antagonists (e.g., TRACLEER).

[0448] Exemplary combination therapies of oral dosage formulations provided of protease-resistant growth hormone polypeptides for the treatment of growth hormone deficiencies, or diseases or conditions for which growth hormone is administered, include combination treatment with one or more therapeutic agents, including, but not limited to, gonadotropin releasing hormone (GNRH) analogs, insulin-like growth factor 1, (rhIGF-1), growth hormone-releasing peptides (GRP), Acipimox® or other free fatty acid regulation agents, leutenizing hormone releasing hormone, anabolic steroids, such as oxandrolone and testosterone, letrozole, and cyproterone acetate.

### I. ARTICLES OF MANUFACTURE AND KITS

[0449] Oral dosage formulations of protease-resistant polypeptides can be packaged as articles of manufacture containing packaging material, a pharmaceutical composition which is effective for treating a disease or disorder, and a label that indicates that the protease-resistant polypeptide is to be used for treating the disease or disorder. A wide array of oral dosage formulations of the protease-resistant polypeptides is contemplated as are a variety of treatments for any disease or disorder that can be prevented or treated by administration of the polypeptide.

[0450] The oral dosage formulation, if desired, can be provided as a package, in a kit or dispenser device, that can contain one or more unit dosage forms containing the protease-resistant polypeptide. The package, for example, can contain a metal or plastic foil, such as a blister pack. The pack or dispenser device can be accompanied by instructions for administration. The compositions containing the protease-resistant polypeptides can be packaged as articles of manufacture containing packaging material, an oral dosage formulation provided herein, and a label that indicates the disorder for which the oral dosage formulation is provided.

[0451] The articles of manufacture provided herein contain packaging materials. Packaging materials for use in packaging pharmaceutical products are well known to those of skill in the art. See, for example, U.S. Pat. Nos. 5,323,907, 5,052,558 and 5,033,352, each of which is incorporated herein in its entirety. Examples of pharmaceutical packaging materials for oral dosage formulations include, but are not limited to, blister packs, a blister card, a box, a foil packet, bottles, tubes, bags, vials, containers and any packaging material or a combination thereof, suitable for a selected oral dosage formulation, mode of administration, and treatment. The kits also can be designed in a manner such that they are tamper resistant or designed to indicate if tampering has occurred. Optionally, a kit can contain the oral dosage formulation provided herein in combination with another pharmaceutical composition.

[0452] The oral dosage formulations of protease-resistant polypeptides can be provided as kits. Kits can include an oral pharmaceutical composition described herein and an item for administration. For example an oral dosage formulation of a therapeutic polypeptide can be supplied with a device for administration, such as a dosage cup. The kit can, optionally, include a notice or printed instructions for application including dosages, dosing regimens and instructions for modes of administration. Such printed instructions also can be in a form prescribed by a governmental agency regulating the manufacture, use, or sale of pharmaceuticals or biological products, which notice reflects approval by the agency of the manufacture, use, or sale for human administration to treat a condition that can be treated by administration of the protease-resistant polypeptide. In some examples, the kit optionally contains printed matter or other medium, such as a CD, such as instruction for use of the dosage form to treat a condition or disease. Kits also can include an oral pharmaceutical composition described herein and an item for diagnosis. For example, such kits can include an item for measuring the concentration, amount or activity of a protease-resistant therapeutic polypeptide or a therapeutic polypeptide regulated system of a subject.

### J. EXAMPLES

[0453] The following examples are included for illustrative purposes only and are not intended to limit the scope of the embodiments provided herein. The results of pharmacokinetic (PK) studies presented herein illustrate exemplary model systems for studying the PK profiles of the oral dosage formulations provide. As such, the dosages employed are substantially higher and do not necessarily represent a linear relationship for the selection of dosages for treatment of humans, but can be used as a guide for the empiric determination of therapeutically effective doses for treatment of humans based on the disease or condition to be treated.

### Example 1

### Assessment of Protease Resistance of Candidate LEAD Polypeptides

### I. Methods

[0454] A. Resistance to Proteolysis

[0455] The following protocol to assess resistance to proteases was used for all proteins tested, unless otherwise indicated.

[0456] Mutants were treated with proteases in order to identify resistant molecules. The relative resistance of the mutant proteins compared to the native protein against enzymatic cleavage was determined by exposure to a mixture of proteases (containing 1.5 pg of each of the following proteases (1% wt/wt, Sigma): α-chymotrypsin, carboxypeptidase, endoproteinase Arg-C, endoproteinase Asp-N, endoproteinase Glu-C, endoproteinase Lys-C, and trypsin) at 25° C. for a set time period between 30 minutes to either 24 or 48 hours depending on the experiment. At the end of the incubation time, 10 μl of anti-protease complete medium containing mini EDTA free tablets, Roche (one tablet was dissolved in 10 ml of DMEM and then diluted to 1/1000) was added to each reaction in order to inhibit protease activity. Treated samples were then used to determine residual activity such as anti-viral or proliferative activity as set forth below in part B and C.

[0457] For hGH, a 3% mixture of endoproteinase AspN, endoproteinase GluC, alpha-chymotrypsin, and trypsin was used. The proteins were incubated with the proteases at 25° C. for a set time period between 30 minutes to 120 minutes. Residual activity was determined as described above.

[0458] For erythropoietin, the relative resistance of the mutant proteins compared to the native protein against enzymatic cleavage was determined by exposure to a 1.5% protease mixture (wt/wt) containing each of the following proteases: α-chymotrypsin, Endoproteinase GluC and trypsin (Sigma) or by exposure to a 3% protease mixture (wt/wt) containing each of the following proteases, α-chymotrypsin, Endoproteinase GluC and trypsin (Sigma). The protease reaction was processed for a period of 0.5 to 2 hours as described above and residual activity was determined.

[0459] B. Anti-Viral Activity

[0460] Residual activity of Interferon-alpha (i.e., IFN-α-2b), Interferon-gamma (IFN-γ) and Interferon-beat (IFN-β) variant polypeptides were assessed in an anti-viral assay. Anti-viral activity can be measured by cytopathic effects (CPE). Anti-viral activity of variant polypeptides was determined by the capacity of the cytokine to protect HeLa cells against EMC (mouse encephalomyocarditis) virus-induced cytopathic effects. The day before, HeLa cells (2×10⁵ cells/ml) were seeded in flat-bottomed 96-well plates containing 100 μl/well of Dulbecco's MEM-Glutamax-sodium pyruvate medium supplemented with 5% SVF and 0.2% of gentamicin. Cells were grown at 37° C. in an atmosphere of 5% CO₂ for 24 hours.

[0461] Two-fold serial dilutions of variant polypeptide samples preincubated with protease (as described in part A above) were made with MEM complete media in 96-deep well plates. Twenty-four (24) hours after seeding the cells, the medium was aspirated from each well and 100 μl of diluted samples were added to HeLa cells. Each sample dilution was assessed in triplicate. The last two rows of the plates were filled with 100 μl of medium without added sample in order to serve as controls for cells with and without virus. After 24 hours of growth, a 1/1000 EMC virus dilution solution was placed in each well, except for the cell control row. Plates were returned to the CO₂ incubator for 40-48 hours. The medium was discarded, and the cells were washed twice with 100 μl of 1×PBS and stained for 1 hour with 80-100 μl of staining solution (trypan blue or ethanol-formamide-methyl blue mixture) to determine the proportion of intact cells. Plates were washed in a distilled water bath and the cell-bound dye was extracted using 80-100 μl of ethylene-glycol mono-ethyl-ether (Sigma). The absorbance of the dye was measured using an ELISA plate reader (Spectramax; Molecular devices) at 660 nm.

[0462] C. Cell Proliferation Activity

[0463] 1. Nb2-11 Cells

[0464] Residual activity of Growth Hormone (i.e. hGH) variants were tested by assessing their effects on the proliferation of rat lymphoblast Nb2-11 cells. Nb2-11 cells were cultured in Fisher medium supplemented with 10% of SVF and 10% of equine serum (ES). Twenty four (24) hours before the proliferation assay, the cells were centrifuged and washed with phosphate buffered saline (PBS). The cells were then cultured in Fisher medium supplemented only with 10% of ES at a density of 0.5-0.8×10⁶ cells/ml. After 24 hours of culture the cells were seeded in 96-well plates at 4×10⁴ cells/well and treated with three-fold serial dilution of pre-treated native human growth hormone (hGH) or mutants between 6000 pg/ml and 0.3 pg/ml in triplicate. National Institute for Biological Standards and Control (NIBSC) hGH was used as an internal control for each proliferation assay.

[0465] After 48 hours of treatment with either native or mutant hGH (pre-treated with proteases) the proliferation of Nb2-11 cells was measured. Twenty microliters (20 μl) of Cell Titer 96 AQ (Promega) per well was added and cells incubated for 1 hour at 37° C. The conversion of tetrazolium MTS into a soluble formazan was measured. Samples were read in a Spectramax reader (Molecular Device) at 490 nm.

[0466] 2. TF-1 Cells

[0467] Residual activity of erythropoietin (EPO) variants was tested by assessing their effects on the proliferation of human erythroleukemia cells (TF-1 cell line). TF-1 cell line was maintained in RPMI 1640 medium (Invitrogen) supplemented with 10% FCS, 2 mM L-glutamine and 2 ng/ml of human recombinant GM-CSF at 37° C. in a humid atmosphere with a composition of 7% CO₂/95% air in T175 (175 cm2) polystyrene tissue culture flask and split two times per week. Twenty four (24) hours before use in proliferation assays, cells were washed two times in ice cold PBS and re-suspended for 16 hours in GM-CSF free RPMI medium supplemented with 2 mM glutamine and 10% FCS.

[0468] TF-1 cells were plated into 96-well plates at 4×10⁴ cells per well in 70 μl of GM-CSF free RPMI medium supplemented with 2 mM glutamine and 10% FCS. Each sample (native or mutant EPO pre-treated with protease as described in part A above) were subjected to a two-fold serial dilution into 96-deep-well plates and EPO dilutions (30 μl) were added to each well containing 70 μl of TF-1 cells with a final concentration ranging from 70000 to 34.2 pg/ml. Each EPO sample dilution was assessed in triplicate. No GM-CSF was added to the last row (“G” row) of the flat-bottomed 96-well plates in order to evaluate basal absorbance of non-proliferative cells. A 2-fold serial dilution (70000 to 34.2 pg/ml) of internal positive controls including both the second international standard for EPO (NIBSC, 88/574) and the first international standard for GM-CSF (NIBSC, 88/646) also were performed and added in triplicate to the 96-well plate and assayed in order to standardize proliferation results.

[0469] The plates were incubated for 48 hours at 37° C. in a humidified, 7% CO₂ atmosphere. After 48 hours of growth, 20 μl of Cell titer 96 Aqueous one solution reagent (Promega) was added to each well and incubated 3 hours at 37° C. in an atmosphere of 7% CO₂. To measure the amount of colored soluble formazan produced by cellular reduction of the MTS, the absorbance of the dye was measured using an ELISA plate reader (Spectramax) at 490 nm.

### II. Results

[0470] The methods described above to assess protease resistance of candidate LEAD polypeptides followed by assessment of residual activity were applied to thousands of polypeptides. Results are provided below for assessment of protease resistance of some exemplary candidate LEAD and SuperLEAD polypeptides. The data are not meant to be representative of all proteases, but are exemplary data showing the resistance to proteolysis to an exemplary protease cocktail as described in the methods above. Thus, the data are not comprehensive and are not meant to be indicative that other polypeptides do not exhibit protease resistance.

[0471] A. Interferon-Alpha

[0472] A total of 184 variants of interferon-alpha (IFN-α2b) candidate LEAD polypeptides were generated and tested based on the predetermined property of increased protease resistance.

[0473] Prior to the assessment of protease resistance, IFN-α candidate LEADs were assessed for activity in an anti-viral assay using the EMCV replication assay in HeLa cells as described above. Native IFN-α and the selected leads were tested in a series of dilutions ranging from 3000 pg/mL to 1.46 pg/mL. The specific activity (i.e. activity per unit protein mass; units/mg protein) of each IFN-α mutant was compared with that of native IFN-α and expressed as million of international units (MIU) determined from experimental EC₅₀.

[0474] The anti-viral specific activity (expressed in MIU/mg) measurements for four exemplary LEAD polypeptides, including IFN-α-2b(E41Q) (lead 11), in comparison with native IFN-α are as follows: 280 MIU/mg for native IFN-α and between 200 and 400 MIU/mg for the selected LEADs. The candidate E41Q IFN-α-2b LEAD had a specific activity of 300 MIU/mg. Thus it was concluded that IFN-α-2b(E41Q) exhibited antiviral activity equivalent to native IFN-α.

[0475] Candidate LEADs were tested in vitro for protease resistance by incubating 100 μl of 1500 pg/ml (500 U/ml) of IFN-α-2b with a cocktail of proteases as described above. Following protease treatment, residual activity was assessed by an anti-viral assay. Table 23 shows the results of some of the tested polypeptides. The resistance to proteolysis is indicated as “no change” or “increased” as compared to the residual activity of the respective native polypeptide under the same protease treatment conditions. The results show that many of the polypeptides tested exhibited an increased resistance to protease in vitro as compared to native IFN-α.

TABLE 23
Resistance to Proteolysis of
Candidate Interferon-alpha LEADS

| | Resistance to |
|---|---|
| Mutant | proteolysis |
| F27V | No change |
| R33H | No change |
| E41Q | Increased |
| E41H | No change |
| E58Q | Increased |
| E58H | Increased |
| E78Q | Increased |
| E78H | Increased |
| Y89H | No change |
| E107Q | Increased |
| E107H | Increased |
| P109A | No change |
| L110V | No change |
| M111V | No change |
| E113H | Increased |
| L117V | Increased |
| L117I | Increased |
| K121Q | Increased |
| R125H | Increased |
| R125Q | Increased |
| K133Q | Increased |
| E159H | Increased |
| E159Q | Increased |

[0476] One variant polypeptide having the amino acid replacement E41Q was chosen for further kinetic analysis. The decreased susceptibility to proteases was evaluated by exposing the E41Q mutant IFN-α-2b and native IFN-α-2b to the following proteolytic treatments: a) human blood lysate; b) human serum; c) chymotrypsin (10% w/w); d) a protease mixture (1% w/w of α-chymotrypsin, carboxypeptidase, endoproteinase Arg-C, endoproteinase Asp-N, endoproteinase Glu-C, endoproteinase Lys-C and trypsin) as described above in the methods for assaying resistance to proteases, except that incubation with protease mixture was done for variable time from 0-48 hours. The protease reaction was stopped at 0.5 h, 1 h, 4 h, 8 h, 16 h, 24 h and 48 hours of incubation with protease, followed by assessment of residual anti-viral activity. The results were depicted as a percentage of the anti-viral activity of native IFN-α-2b without incubation by protease. The results show that the native IFN-α lost greater than 30% activity within 1 hour of treatment with blood lysate or the protease pool, 50% activity within 1 hour of treatment with serum and 60% activity within 1 hour of treatment with chymotrypsin. The level of activity of native IFN-α-2b was maintained at only 25-30% of its activity at 24 hours under all protease incubation conditions tested. In contrast, the results show that mutant IFN-α maintained approximately 100% anti-viral activity within 1 hour of protease treatment under all conditions tested, and 50-90% of the activity was maintained depending on the protease incubation condition for up to 24 hours compared to native IFN-α.

[0477] B. Growth Hormone

[0478] A total of 222 variants of human Growth Hormone (hGH) were generated and tested based on the predetermined property of increased protease resistance. Candidate LEADs and SuperLEADs of hGH were tested in vitro for protease resistance by incubating 15 ng of native hGH or variants with a cocktail of proteases as described above, followed by assessment of residual proliferative activity on Nb2-11 cells as described above. Table 24 shows the results of some of the tested polypeptides. The resistance to proteolysis is indicated as “no change” or “increased” as compared to the residual activity of the respective native polypeptide under the same protease treatment conditions. The results show that many of the polypeptides tested exhibited an increased resistance to protease in vitro as compared to native hGH.

TABLE 24
Resistance to Proteolysis of Candidate Growth
Hormone LEADS and SuperLEADs

| | Resistance to | | Resistance to |
|---|---|---|---|
| Mutation | proteolysis | Mutation | proteolysis |
| F1I/P2A | increase | F92V | no changes |
| F1I/P2S | no changes | L93I | no changes |
| F1V/P2A | no changes | L93V | no changes |
| F1V/P2S | no changes | R94H | no changes |
| P5A | no changes | R94Q | no changes |
| P5S | increase | F97I | no changes |
| L6I | no changes | F97V | no changes |
| L6V | no changes | L101I | no changes |
| R8H | no changes | L101V | increase |
| R8Q | no changes | Y103H | no changes |
| L9I | no changes | Y103I | no changes |
| L9V | increase | D107N | no changes |
| F10I | no changes | D107Q | no changes |
| F10V | no changes | Y111H | no changes |
| D11N | increase | Y111I | increase |
| D11Q | no changes | D112N | increase |
| M14I | no changes | D112Q | no changes |
| M14V | increase | L113I | no changes |
| L15I | no changes | L113V | no changes |
| L15V | no changes | L114I | no changes |
| R16H | increase | L114V | no changes |
| R16Q | no changes | K115N | no changes |
| R19H | no changes | K115Q | no changes |
| R19Q | no changes | D116N | no changes |
| L20I | no changes | D116Q | increase |
| L20V | no changes | L117I | no changes |
| L23I | increase | L117V | no changes |
| L23V | increase | E118Q | no changes |
| F25I | no changes | E118H | no changes |
| F25V | no changes | E118N | no changes |
| D26N | increase | E119Q | increase |
| D26Q | no changes | E119H | no changes |
| Y28H | no changes | E119N | no changes |
| Y28I | no changes | L124I | no changes |
| E30Q | no changes | L124V | increase |
| E30H | no changes | M125I | increase |
| E30N | no changes | M125V | increase |
| F31I | no changes | R127H | no changes |
| F31V | no changes | R127Q | no changes |
| E32Q | no changes | L128I | no changes |
| E32H | no changes | L128V | no changes |
| E32N | no changes | E129Q | no changes |
| E33Q | no changes | E129H | no changes |
| E33H | no changes | E129N | no changes |
| E33N | no changes | D130N | no changes |
| Y35H | no changes | D130Q | no changes |
| Y35I | no changes | P133A | increase |
| P37A | no changes | P133S | no changes |
| P37S | no changes | R134H | increase |
| K38N | increase | R134Q | no changes |
| K38Q | no changes | F139I | no changes |
| E39Q | no changes | F139V | no changes |
| E39H | no changes | K140N | increase |
| E39N | no changes | K140Q | no changes |
| K41N | no changes | Y143H | no changes |
| K41Q | increase | Y143I | no changes |
| Y42H | increase | K145N | no changes |
| Y42I | increase | K145Q | no changes |
| F44I | no changes | F146I | no changes |
| F44V | no changes | F146V | no changes |
| L45I | no changes | D147N | increase |
| L45V | no changes | D147Q | increase |
| P48A | no changes | D153N | increase |
| P48S | no changes | D153Q | no changes |
| L52I | no changes | D154N | no changes |
| L52V | no changes | D154Q | no changes |
| F54I | no changes | L156I | increase |
| F54V | no changes | L156V | no changes |
| E56Q | increase | L157I | increase |
| E56H | no changes | L157V | no changes |
| E56N | increase | K158N | increase |
| P59A | no changes | K158Q | no changes |
| P59S | no changes | Y160H | no changes |
| P61A | no changes | Y160I | no changes |
| P61S | no changes | L162I | increase |
| R64H | no changes | L162V | no changes |
| R64Q | no changes | L163I | no changes |
| E65Q | increase | L163V | no changes |
| E65H | no changes | Y164H | no changes |
| E65N | no changes | Y164I | no changes |
| E66Q | increase | F166I | increase |
| E66H | no changes | F166V | no changes |
| E66N | no changes | R167H | increase |
| K70N | no changes | R167Q | increase |
| K70Q | no changes | K168N | increase |
| L73I | no changes | K168Q | increase |
| L73V | increase | D169N | no changes |
| E74Q | no changes | D169Q | increase |
| E74H | no changes | M170I | no changes |
| E74N | increase | M170V | no changes |
| L75I | no changes | D171N | increase |
| L75V | no changes | D171Q | increase |
| L76I | no changes | K172N | no changes |
| L76V | no changes | K172Q | increase |
| R77H | no changes | E174Q | increase |
| R77Q | no changes | E174H | increase |
| L80I | no changes | E174N | increase |
| L80V | no changes | F176I | no changes |
| L81I | no changes | F176V | no changes |
| L81V | increase | L177I | increase |
| L82I | no changes | L177V | increase |
| L82V | no changes | R178H | no changes |
| W86H | no changes | R178Q | increase |
| W86S | no changes | R183H | no changes |
| L87I | no changes | R183Q | no changes |
| L87V | increase | E186Q | no changes |
| E88Q | no changes | E186H | no changes |
| E88H | no changes | E186N | no changes |
| E88N | no changes | F191I | increase |
| P89A | no changes | F191V | no changes |
| P89S | no changes | hGH WT | |
| F92I | no changes | hGH NIBSC | |

[0479] C. Interferon Gamma

[0480] A total of 148 variants of interferon-gamma (IFN-gamma) were generated and tested based on the predetermined property of increased protease resistance. IFN-gamma candidate LEADs were tested in vitro for protease resistance by incubating 15 ng of native IFN-gamma or variants with a cocktail of proteases as described above, followed by assessment of residual anti-viral activity as described above. Table 25 shows the results of some of the tested polypeptides. The resistance to proteolysis is indicated as “no change” or “increased” as compared to the residual activity of the respective native polypeptide under the same protease treatment conditions. The results show that many of the polypeptides tested exhibited an increased resistance to protease in vitro as compared to native IFN-gamma.

TABLE 25
Resistance to Proteolysis of Candidate Interferon-gamma
LEADs

| | Resistance | | Resistance | | |
|---|---|---|---|---|---|
| | to Pro- | | to Pro- | | Resistance to |
| Mutation | teolysis | Mutation | teolysis | Mutation | Proteolysis |
| D5N | no change | D44N | ND | D94N | ND |
| D5Q | no change | D44Q | ND | D94Q | ND |
| P6A | no change | R45H | no change | F95I | ND |
| P6S | no change | R45Q | no change | F95V | ND |
| Y7H | no change | F57I | no change | E96Q | Increase |
| Y7I | no change | F57V | increase | E96H | Increase |
| K9N | no change | K58N | no change | E96N | Increase |
| K9Q | no change | K58Q | no change | K97N | no change |
| E10Q | no change | L59I | no change | K97Q | no change |
| E10H | no change | L59V | no change | L98I | Increase |
| E10N | no change | F60I | no change | L98V | Increase |
| E12Q | no change | F60V | ND | Y101H | no change |
| E12H | no change | K61N | no change | Y101I | no change |
| E12N | no change | K61Q | no change | D105N | Increase |
| L14I | no change | F63I | increase | D105Q | Increase |
| L14V | no change | F63V | increase | L106I | Increase |
| K15N | no change | K64N | ND | L106V | Increase |
| K15Q | no change | K64Q | increase | E115Q | ND |
| K16N | no change | D65N | no change | E115H | ND |
| K16Q | no change | D65Q | no change | E115N | ND |
| Y17H | no change | D66N | increase | E122Q | ND |
| Y17I | no change | D66Q | increase | E122H | ND |
| F18I | no change | K71N | no change | E122N | ND |
| F18V | no change | K71Q | no change | L123I | ND |
| D24N | ND | E74Q | no change | L123V | ND |
| D24Q | ND | E74H | no change | P125A | Increase |
| D27N | ND | E74N | no change | P125S | Increase |
| D27Q | ND | K77N | no change | K128N | no change |
| L31I | ND | K77Q | no change | K128Q | no change |
| L31V | ND | E78Q | no change | K131N | ND |
| F32I | ND | E78H | no change | K131Q | ND |
| F32V | ND | E78N | no change | R132H | no change |
| L33I | increase | D79N | no change | R132Q | no change |
| L33V | increase | D79Q | ND | K133N | Increase |
| L36I | no change | K83N | no change | K133Q | Increase |
| L36V | no change | K83Q | no change | R134H | Increase |
| K37N | increase | F84I | ND | R134Q | Increase |
| K37Q | increase | F84V | ND | M137I | ND |
| W39H | ND | K89N | increase | M137V | Increase |
| W39S | ND | K89Q | increase | L138I | ND |
| K40N | no change | K90N | increase | L138V | Increase |
| K40Q | no change | K90Q | increase | F139I | Increase |
| E41Q | increase | K91N | ND | F139V | Increase |
| E41H | increase | K91Q | ND | R142H | Increase |
| E41N | increase | R92H | no change | R142Q | Increase |
| E42Q | no change | R92Q | no change | R143H | Increase |
| E42H | no change | D93N | ND | R143Q | Increase |
| E42N | no change | D93Q | ND | | |

ND: Not determined

[0481] D. Erythropoietin

[0482] A total of 199 variants of erythropoietin (EPO) were generated and tested based on the predetermined property of increased protease resistance. EPO candidate LEADs were tested in vitro for protease resistance by incubating 557.2 ng of native EPO or variants with a cocktail of proteases containing a 1.5% protease mixture (wt/wt) as described above, followed by assessment of residual anti-proliferative activity on TF-1 cells as described above. Table 26 shows the results of some of the tested polypeptides. The resistance to proteolysis is indicated as “no change” or “increased” as compared to the residual activity of the respective native polypeptide under the same protease treatment conditions. The results show that many of the polypeptides tested exhibited an increased resistance to protease in vitro as compared to native EPO.

TABLE 26
Resistance to Proteolysis of Candidate EPO LEADs

| | | Resistance |
|---|---|---|
| Nemo | | to |
| Code # | Mutation | proteases |
| 1 | P2S | ND |
| 2 | P2A | no change |
| 3 | P3S | no change |
| 4 | P3A | increase |
| 5 | R4H | increase |
| 6 | R4Q | increase |
| 7 | C7S | ND |
| 8 | C7V | ND |
| 9 | D8Q | increase |
| 10 | D8H | no change |
| 11 | R10H | increase |
| 12 | R10Q | no change |
| 13 | L12V | no change |
| 14 | L12I | no change |
| 15 | E18Q | increase |
| 16 | E18H | no change |
| 17 | K20Q | increase |
| 18 | K20T | no change |
| 19 | E21Q | increase |
| 20 | E21H | no change |
| 21 | E23Q | no change |
| 22 | E23H | no change |
| 23 | C29S | ND |
| 24 | C29V | ND |
| 25 | E31Q | increase |
| 26 | E31H | no change |
| 27 | L35V | no change |
| 28 | L35I | no change |
| 29 | E37Q | increase |
| 30 | E37H | ND |
| 31 | P42S | ND |
| 32 | P42A | ND |
| 33 | D43Q | ND |
| 34 | D43H | ND |
| 35 | K45Q | no change |
| 36 | K45T | increase |
| 37 | F48I | no change |
| 38 | F48V | increase |
| 39 | Y49H | no change |
| 40 | Y49I | increase |
| 41 | W51S | no change |
| 42 | W51H | ND |
| 43 | K52Q | increase |
| 44 | K52T | no change |
| 45 | R53H | increase |
| 46 | R53Q | ND |
| 47 | M54V | no change |
| 48 | M54I | no change |
| 49 | E55Q | no change |
| 50 | E55H | ND |
| 51 | E62Q | no change |
| 52 | E62H | no change |
| 53 | W64S | increase |
| 54 | W64H | no change |
| 55 | L69V | no change |
| 56 | L69I | increase |
| 57 | E72Q | ND |
| 58 | E72H | ND |
| 59 | L75V | ND |
| 60 | L75I | increase |
| 61 | R76H | no change |
| 62 | R76Q | no change |
| 63 | L80V | no change |
| 64 | L80I | increase |
| 65 | P87S | increase |
| 66 | P87A | increase |
| 67 | W88S | no change |
| 68 | W88H | ND |
| 69 | E89Q | increase |
| 70 | E89H | increase |
| 71 | P90S | increase |
| 72 | P90A | ND |
| 73 | L93V | increase |
| 74 | L93I | increase |
| 75 | D96Q | increase |
| 76 | D96H | increase |
| 77 | K97Q | ND |
| 78 | K97T | ND |
| 79 | L102V | increase |
| 80 | L102I | increase |
| 81 | R110H | increase |
| 82 | R110Q | increase |
| 83 | L112V | ND |
| 84 | L112I | ND |
| 85 | K116Q | increase |
| 86 | K116T | increase |
| 87 | P121S | ND |
| 88 | P121A | increase |
| 89 | P122S | increase |
| 90 | P122A | increase |
| 91 | D123Q | ND |
| 92 | D123H | increase |
| 93 | P129S | increase |
| 94 | P129A | increase |
| 95 | L130V | ND |
| 96 | L130I | increase |
| 97 | R131H | increase |
| 98 | R131Q | increase |
| 99 | D136Q | ND |
| 100 | D136H | ND |
| 101 | R143H | increase |
| 102 | R143Q | increase |
| 103 | Y145H | ND |
| 104 | Y145I | ND |
| 105 | R150H | increase |
| 106 | R150Q | increase |
| 107 | K152Q | ND |
| 108 | K152T | ND |
| 109 | K154Q | no change |
| 110 | K154T | ND |
| 111 | L155V | ND |
| 112 | L155I | ND |
| 113 | E159Q | no change |
| 114 | E159H | ND |
| 115 | R162H | ND |
| 116 | R162Q | ND |
| 117 | C29A | ND |
| 118 | C29I | ND |
| 119 | C29T | ND |
| 120 | C7A | ND |
| 121 | C7I | ND |
| 122 | C7T | ND |
| 123 | D123N | increase |
| 124 | D136N | increase |
| 125 | D43N | ND |
| 126 | D96N | no change |
| 127 | E159N | increase |
| 128 | E18N | ND |
| 129 | E21N | ND |
| 130 | E23N | ND |
| 131 | E31N | ND |
| 132 | E37N | ND |
| 133 | E55N | increase |
| 134 | E62N | ND |
| 135 | E72N | ND |
| 136 | E89N | ND |
| 137 | K116N | increase |
| 138 | K152N | ND |
| 139 | K154N | ND |
| 140 | K20N | ND |
| 141 | K45N | increase |
| 142 | K52N | increase |
| 143 | K97N | ND |
| 144 | D8N | ND |
| 145 | D165Q | increase |
| 146 | D165H | increase |
| 147 | D165N | increase |
| 148 | R166H | increase |
| 149 | R166Q | increase |
| 354 | L5I | ND |
| 355 | L5V | no change |
| 356 | E13Q | ND |
| 357 | E13H | ND |
| 358 | E13N | ND |
| 359 | R14H | ND |
| 360 | R14Q | ND |
| 361 | Y15H | ND |
| 362 | Y15I | ND |
| 363 | L16I | increase |
| 364 | L16V | ND |
| 365 | L17I | ND |
| 366 | L17V | ND |
| 367 | L67I | increase |
| 368 | L67V | ND |
| 369 | L70I | ND |
| 370 | L70V | ND |
| 371 | L81I | ND |
| 372 | L81V | ND |
| 373 | L91I | ND |
| 374 | L91V | increase |
| 375 | R103H | ND |
| 376 | R103Q | ND |
| 377 | L105I | increase |
| 378 | L105V | ND |
| 379 | L108I | ND |
| 380 | L108V | ND |
| 381 | L109I | ND |
| 382 | L109V | no change |
| 383 | E117Q | ND |
| 384 | E117H | ND |
| 385 | E117N | ND |
| 386 | F138I | ND |
| 387 | F138V | ND |
| 388 | R139H | ND |
| 389 | R139Q | ND |
| 390 | K140N | ND |
| 391 | K140Q | ND |
| 392 | L141I | ND |
| 393 | L141V | ND |
| 394 | F142I | ND |
| 395 | F142V | ND |
| 396 | F148I | ND |
| 397 | F148V | ND |
| 398 | L149I | ND |
| 399 | L149V | ND |
| 400 | L153I | ND |
| 401 | L153V | increase |
| 402 | Y156H | ND |
| 403 | Y156I | ND |

ND: Not determined

[0483] In a second set of experiments, resistance to proteolysis was measured as described above, except that a higher concentration of proteases containing 3% protease mixture (wt/wt) containing each of the following proteases, α-chymotrypsin, Endoproteinase GluC and trypsin (Sigma), was used to assess resistance to proteolysis. Table 27 shows the results of some of the tested polypeptides. The data are expressed as relative resistance to proteases among the samples tested: (+), (++), or (+++), with (+++) indicating the highest resistance to proteases, and (−) indicating no change compared to native erythropoietin.

TABLE 27
Resistance to Proteolysis of Candidate EPO LEADS

| | | Resistance |
|---|---|---|
| Nemo | | to |
| Code # | Mutation | proteases |
| 1 | P2S | — |
| 2 | P2A | — |
| 3 | P3S | — |
| 4 | P3A | +++ |
| 5 | R4H | + |
| 6 | R4Q | + |
| 7 | C7S | ND |
| 8 | C7V | ND |
| 9 | D8Q | — |
| 10 | D8H | — |
| 11 | R10H | + |
| 12 | R10Q | — |
| 13 | L12V | — |
| 14 | L12I | — |
| 15 | E18Q | + |
| 16 | E18H | — |
| 17 | K20Q | +++ |
| 18 | K20T | — |
| 19 | E21Q | + |
| 20 | E21H | — |
| 21 | E23Q | — |
| 22 | E23H | — |
| 23 | C29S | ND |
| 24 | C29V | ND |
| 25 | E31Q | + |
| 26 | E31H | — |
| 27 | L35V | — |
| 28 | L35I | — |
| 29 | E37Q | + |
| 30 | E37H | — |
| 31 | P42S | ND |
| 32 | P42A | ND |
| 33 | D43Q | — |
| 34 | D43H | — |
| 35 | K45Q | — |
| 36 | K45T | ++ |
| 37 | F48I | ++ |
| 38 | F48V | + |
| 39 | Y49H | — |
| 40 | Y49I | + |
| 41 | W51S | — |
| 42 | W51H | — |
| 43 | K52Q | ++ |
| 44 | K52T | + |
| 45 | R53H | + |
| 46 | R53Q | ND |
| 47 | M54V | — |
| 48 | M54I | — |
| 49 | E55Q | — |
| 50 | E55H | — |
| 51 | E62Q | — |
| 52 | E62H | — |
| 53 | W64S | — |
| 54 | W64H | — |
| 55 | L69V | — |
| 56 | L69I | + |
| 57 | E72Q | ND |
| 58 | E72H | ND |
| 59 | L75V | — |
| 60 | L75I | + |
| 61 | R76H | — |
| 62 | R76Q | — |
| 63 | L80V | — |
| 64 | L80I | ++ |
| 65 | P87S | + |
| 66 | P87A | + |
| 67 | W88S | — |
| 68 | W88H | ND |
| 69 | E89Q | ++ |
| 70 | E89H | ++ |
| 71 | P90S | ++ |
| 72 | P90A | + |
| 73 | L93V | + |
| 74 | L93I | +++ |
| 75 | D96Q | +++ |
| 76 | D96H | + |
| 77 | K97Q | — |
| 78 | K97T | — |
| 79 | L102V | — |
| 80 | L102I | — |
| 81 | R110H | — |
| 82 | R110Q | + |
| 83 | L112V | — |
| 84 | L112I | ND |
| 85 | K116Q | + |
| 86 | K116T | ++ |
| 87 | P121S | — |
| 88 | P121A | + |
| 89 | P122S | + |
| 90 | P122A | + |
| 91 | D123Q | ++ |
| 92 | D123H | + |
| 93 | P129S | + |
| 94 | P129A | + |
| 95 | L130V | ++ |
| 96 | L130I | +++ |
| 97 | R131H | + |
| 98 | R131Q | ++ |
| 99 | D136Q | — |
| 100 | D136H | — |
| 101 | R143H | ++ |
| 102 | R143Q | +++ |
| 103 | Y145H | ND |
| 104 | Y145I | ND |
| 105 | R150H | +++ |
| 106 | R150Q | + |
| 107 | K152Q | — |
| 108 | K152T | — |
| 109 | K154Q | — |
| 110 | K154T | — |
| 111 | L155V | — |
| 112 | L155I | — |
| 113 | E159Q | — |
| 114 | E159H | — |
| 115 | R162H | — |
| 116 | R162Q | — |
| 117 | C29A | ND |
| 118 | C29I | ND |
| 119 | C29T | — |
| 120 | C7A | ND |
| 121 | C7I | ND |
| 122 | C7T | ND |
| 123 | D123N | ++ |
| 124 | D136N | ++ |
| 125 | D43N | + |
| 126 | D96N | + |
| 127 | E159N | +++ |
| 128 | E18N | — |
| 129 | E21N | — |
| 130 | E23N | — |
| 131 | E31N | — |
| 132 | E37N | — |
| 133 | E55N | — |
| 134 | E62N | — |
| 135 | E72N | — |
| 136 | E89N | + |
| 137 | K116N | ++ |
| 138 | K152N | — |
| 139 | K154N | ND |
| 140 | K20N | — |
| 141 | K45N | ++ |
| 142 | K52N | ++ |
| 143 | K97N | — |
| 144 | D8N | — |
| 145 | D165Q | ++ |
| 146 | D165H | ++ |
| 147 | D165N | ++ |
| 148 | R166H | ++ |
| 149 | R166Q | + |
| 354 | L5I | — |
| 355 | L5V | — |
| 356 | E13Q | — |
| 357 | E13H | — |
| 358 | E13N | — |
| 359 | R14H | — |
| 360 | R14Q | — |
| 361 | Y15H | — |
| 362 | Y15I | — |
| 363 | L16I | ++ |
| 364 | L16V | ++ |
| 365 | L17I | ++ |
| 366 | L17V | + |
| 367 | L67I | ND |
| 368 | L67V | ND |
| 369 | L70I | ND |
| 370 | L70V | ND |
| 371 | L81I | — |
| 372 | L81V | — |
| 373 | L91I | — |
| 374 | L91V | — |
| 375 | R103H | — |
| 376 | R103Q | — |
| 377 | L105I | + |
| 378 | L105V | — |
| 379 | L108I | — |
| 380 | L108V | — |
| 381 | L109I | — |
| 382 | L109V | — |
| 383 | E117Q | — |
| 384 | E117H | — |
| 385 | E117N | — |
| 386 | F138I | ND |
| 387 | F138V | — |
| 388 | R139H | +++ |
| 389 | R139Q | +++ |
| 390 | K140N | — |
| 391 | K140Q | — |
| 392 | L141I | — |
| 393 | L141V | — |
| 394 | F142I | ND |
| 395 | F142V | ND |
| 396 | F148I | ND |
| 397 | F148V | ND |
| 398 | L149I | — |
| 399 | L149V | — |
| 400 | L153I | — |
| 401 | L153V | ++ |
| 402 | Y156H | — |
| 403 | Y156I | ND |

ND: Not determined

[0484] E. Interferon Beta

[0485] A total of 340 variant LEADs of Interferon beta (IFN-β) and 38 SuperLEADs were generated and tested based on the predetermined property of increased protease resistance. IFN-β candidate LEADs and SuperLEADs were tested in vitro for protease resistance using the method as described above, except that the resistance to protease was tested over time. Briefly, 100 μl of IFN-β at 400 and 800 pg/ml were incubated for variable times (0 h, 0.5 h, 2 h, 4 h, 8 h, 12 h, 24 h and 48 h) with a cocktail of proteases as described above, followed by assessment of residual anti-viral activity. The time of incubation with proteases required to give 50% of total activity (anti-viral) compared to the absence of incubation with proteases was determined. Table 28 (LEADs) and Table 29 (SuperLEADs) depicts the results of kinetic analysis of residual activity of some exemplary non-limiting IFN-β LEADs and SuperLEADs following treatment with protease and the time of incubation required to give 50% of total anti-viral activity. Also depicted in Table 28 and Table 29 is the rate of increased proteolysis, which is a ratio of time at 50% activity of the modified IFN-β polypeptide compared to the native IFN-β polypeptide.

TABLE 28
IFN-β LEADS Exhibiting Increased Resistance to Proteolysis

| NEMO | | Proteolysis Resistance | Rate: |
|---|---|---|---|
| Code | Mutant | Time at 50% Total Activity | Mutant/Wild-type |
| 9 | L5Q | 10.00 | 5 |
| 58 | M36I | 16.00 | 8 |
| 72 | L47I | 8.00 | 4 |
| 104 | K105S | 9.00 | 4.5 |
| 110 | K108S | 8.00 | 4 |
| 111 | K108H | 9.00 | 4.5 |
| 169 | L5D | 12.00 | 6 |
| 170 | L5E | 14.00 | 7 |
| 247 | L5N | 10.00 | 5 |
| 250 | L6E | 10.00 | 5 |
| 253 | L6Q | 8.00 | 4 |
| 254 | L6R | 10.00 | 5 |
| 255 | L6S | 12.00 | 6 |
| 257 | L9N | 9.00 | 4.5 |
| 259 | Q10D | 22.00 | 11 |
| 266 | S13D | 10.00 | 5 |
| 286 | C17N | 22.00 | 11 |
| 290 | C17T | 8.00 | 4 |
| 299 | N86Q | 12.00 | 6 |
| 301 | N86T | 6.00 | 3 |
| 321 | Q94D | 4.00 | 2 |
| 326 | Q94S | 8.00 | 4 |
| 336 | H97D | 11.00 | 5.5 |
| 369 | N90C | 24.00 | 12 |
| | WT | 2.0 | 1.0 |

TABLE 29
IFN-β SuperLEADS Exhibiting Increased Resistance to Proteolysis

| | | Proteolysis Resistance | |
|---|---|---|---|
| NEMO | | Time at 50% Total | Rate: |
| Code | Mutant | Activity | Mutant/Wild-type |
| 525 | L5E/Q10D | 16 | 8 |
| 528 | L5E/K108S | 24 | 12 |
| 532 | L6Q/L47I | 24 | 12 |
| 533 | L5D/K108S | 24 | 12 |
| 534 | L5N/L6E | 24 | 12 |
| 538 | L5Q/K108S | 16 | 8 |
| 540 | L5N/Q10D | 24 | 12 |
| 541 | L6Q/M36I | 16 | 8 |
| 542 | L5D/N86Q | 20 | 10 |
| 543 | L5N/K108S | 10 | 5 |
| 544 | L5D/L6Q | 10 | 5 |
| 545 | L6E/Q10D | 24 | 12 |
| 547 | L5Q/N86Q | 16 | 8 |
| 548 | L6E/K108S | 20 | 10 |
| 551 | L5D/L47I | 20 | 10 |
| 553 | L6Q/K108S | 16 | 8 |
| 554 | L5N/L6Q | 24 | 12 |
| 557 | L6E/N86Q | 24 | 12 |
| 558 | L5Q/L6Q | 20 | 10 |
| 559 | L5D/M36I | 24 | 12 |
| 560 | L5N/L47I | 24 | 12 |
| 561 | L6Q/N86Q | 24 | 12 |
| 523 | WT | 2.0 | 1.0 |
| 523 | WT | 2.0 | 1.0 |
| 523 | WT | 2.0 | 1.0 |
| 523 | WT | 2.0 | 1.0 |
| 523 | WT | 2.0 | 1.0 |
| 523 | WT | 2.0 | 1.0 |
| 523 | WT Average | 2.0 | 1.0 |

### Example 2

[0486] Cloning and Expression of IFN-α-2b and IFN-α-2b Mutants

[0487] Interferon alpha 2b (IFN-α-2b) cDNA were cloned for expression in mammalian cells and for expression in a prokaryotic expression system. The IFN-α-2b cDNA cloned for expression in mammalian cell encoded the precursor IFN-α-2b polypeptide containing the signal sequence, to facilitate optimal expression. The IFN-α-2b cDNA cloned for expression in prokaryotic cells encoded only the mature IFN-α-2b polypeptide. IFN-α-2b mutants were subsequently generated by site-directed mutagenesis in both the mammalian and prokaryotic systems.

### A. Precursor IFN-α-2b and IFN-α-2b Mutants for Mammalian Expression

[0488] Nucleic acid encoding the precursor form of IFN-α-2b was cloned into a mammalian expression vector for subsequent expression in mammalian cells. The plasmid encoding the precursor form of IFN-α-2b was used in a series of site-directed mutagenesis reactions to generate the IFN-α-2b candidate LEADs described above in Example 1.

[0489] 1. Cloning of Precursor IFN-α-2b cDNA

[0490] Native IFN-α-2b cDNA encoding the precursor polypeptide was generated by PCR amplification and cloned into the mammalian expression vector, pSSV9-2EcoRI, prior to site-directed mutagenesis.

[0491] a. Generation of the Mammalian Expression Vector, pSSV9-2EcoRI

[0492] The mammalian expression vector, pSSV9-2EcoRI, was generated from the pSSV9 CMV 0.3 pA vector (see, Du et al. (1996) Gene Ther 3:254-261), by removing the inverted terminal repeat (ITR) functions and introducing a new EcoRI restriction enzyme site. Briefly, the pSSV9 CMV 0.3 pA vector DNA was digested with PvuII to remove the fragment containing the ITR functions, and then re-ligated. A new EcoRI restriction site was introduced by site-directed mutagenesis using the Quickchange Site-Directed mutagenesis kit (Stratagene), according to the manufacturer's instructions, with specifically-designed complementary oligonucleotides which served as primers that incorporated an EcoRI site into the newly synthesized DNA. The complementary oligonucleotide primers were:

EcoRI forward primer:

(SEQ ID NO: 2072)

5′-GCCTGTATGATTTATTGGATGTTGGAATTCCCTGATGCGGTATTTTC
TCCTTACG-3′
EcoRI reverse primer:

(SEQ ID NO: 2073)

5′-CGTAAGGAGAAAATACCGCATCAGGGAATTCCAACATCCAATAAATC
ATACAGGC-3′

[0493] The QuikChange method involves linear amplification of template DNA by the PfuUltra high-fidelity DNA polymerase. The EcoRI forward primer and EcoRI reverse primer, both containing the EcoRI site, were extended during cycling using the pSSV9 CMV 0.3 pA vector (which had previously been digested with PvuII and re-ligated) as a template. Extension of the primers resulted in incorporation of the EcoRI into the newly synthesized strands, and resulted in a mutated plasmid with staggered nicks. Following amplification, the nucleic acid was treated with DpnI, which digests the dam-methylated parental strands of the E. coli-derived pSSV9 CMV 0.3 pA vector. This resulted in “selection” of the newly-synthesized mutated plasmids, which were not methylated. The vector DNA containing the new EcoRI site was transformed into XL10-Gold ultracompetent E. coli cells, where bacterial ligase repaired the nicks and allowed normal replication to occur.

[0494] The inclusion of the new EcoRI site into the resulting construct was confirmed by sequencing using the following oligonucleotides:

Seq ClaI forward primer:

(SEQ ID NO: 2074)

5′-CTGATTATCAACCGGGGTACATATGATTGACATGC-3′
Seq XmnI reverse primer:

(SEQ ID NO: 2075)

5′-TACGGGATAATACCGCGCCACATAGCAGAAC-3′

[0495] The XmnI-ClaI fragment containing the newly introduced EcoRI site was cloned into pSSV9 CMV 0.3 pA to replace the corresponding wild-type fragment and produce the construct pSSV9-2EcoRI.

[0496] b. Generation of IFN-α-2b Precursor cDNA

[0497] To facilitate optimal expression in mammalian cells, nucleic acid encoding the IFN-α-2b precursor polypeptide was first generated. This was achieved by introducing the nucleotides encoding the 17 amino acid IFN-α-2b signal peptide (first 17 amino acids of SEQ ID NO: 2078) to the 5′ end of the mature IFN-α-2b sequence (SEQ ID NO: 2079), using two PCR amplifications. Native IFN-α-2b cDNA encoding the mature polypeptide was obtained from the pDG6 construct (ATCC). The sequence of the IFN-α-2b cDNA in pDG6 was confirmed through sequencing using the following primers:

| | |
|---|---|
| Seq forward primer: | |
| 5′-CCTGATGAAGGAGGACTC-3′ | (SEQ ID NO: 2076) |
| Seq reverse primer: | |
| 5′-CCAAGCAGCAGATGAGTC-3′ | (SEQ ID NO: 2077) |

[0498] Following sequence verification, the mature IFN-α-2b cDNA was amplified by PCR from the pDG6 construct using the following primers:

Seq IFN-α-2b forward primer:

(SEQ ID NO: 2080)

5′-TCAGCTGCAAGTCAAGCTGCTCTGTGGGCTG-3′
Seq IFN-α-2b reverse XbaI primer
(XbaI site underlined):

(SEQ ID NO: 2081)

5′-GCTCTAGATCATTCCTTACTTCTTAAACTTTCTTGCAAGTTTGTT
GAC-3′

[0499] The resulting PCR product was then used as a template in a PCR reaction in which the “forward” oligonucleotide primer was used to introduce the signal sequence to the 5′ end of the mature IFN-α-2b cDNA during amplification. The primers used in this reaction were as follows:

IFN-α-2b 80bp forward HindIII primer (HindIII site
is underlined; IFN-α-2b signal peptide sequence
is in bold):

(SEQ ID NO: 2082)

5′-CCCAAGCTTATGGCCTTGACCTTTGCTTTACTGGTGGCCCTCCTGGT
GCTCAGCTGCAAGTCAAGCTGCTCTGTGGGCTG-3′
IFN-α-2b reverse XbaI primer (XbaI site is
underlined):

(SEQ ID NO: 2081)

5′-GCTCTAGATCATTCCTTACTTCTTAAACTTTCTTGCAAGTTTGTT
GAC-3′

[0500] The precursor IFN-α-2b cDNA sequence contained in the resulting PCR product was isolated by digestion with HindIII and XbaI and cloned into the pTOPO-TA vector (Invitrogen; SEQ ID NO: 2070) to generate pTOPO-IFN-α-2b. The sequence of the precursor IFN-α-2b was confirmed by automatic DNA sequencing. The pTOPO-IFN-α-2b vector was digested with HindIII and XbaI and the fragment containing the precursor IFN-α-2b cDNA sequence was cloned into the corresponding sites of pSSV9-2EcoRI (described above) to generate the construct pAAV-EcoRI-IFN-α-2b (pNB-AAV-IFN-α-2b).

[0501] 2. Generation of Precursor IFN-α-2b Mutants by Site-Directed Mutagenesis

[0502] As described in Example 1 above, IFN-α-2b candidate LEADs were generated based on the predetermined property of protease resistance using the 2D-scanning technology as described herein and also described in published U.S. Pat. Pub. Nos. US2004/0132977 and US2005/0202438. The mutants were generated by site-directed mutagenesis using mutagenic primers that were designed to generate the appropriate site-specific mutations in the IFNα-2b cDNA. Mutagenesis reactions were performed with the Chameleon mutagenesis kit (Stratagene) using pNB-AAV-IFNα-2b as the template. Each individual mutagenesis reaction was designed to generate one single mutant protein.

[0503] Each individual mutagenesis reaction contains one mutagenic primer. For each reaction, 25 pmoles of each (phosphorylated) mutagenic primer were mixed with 0.25 pmoles of template, 25 pmoles of EcoRI-selection primer (this primer changed one nonessential unique EcoRI-restriction site into a new EcoRV restriction site), and 2 μl of 10× mutagenesis buffer (100 mM Tris-acetate pH 7.5; 100 mM MgOAc; 500 mM KOAc pH 7.5) into each well of 96 well-plates. To allow DNA annealing of the mutagenic and selection primers to the DNA template, PCR plates were incubated at 98° C. during 5 min and immediately placed 5 min on ice, before incubating at room temperature during 30 min. Elongation and ligation reactions were allowed by addition of 7 μl of nucleotide mix (2.86 mM each nucleotide; 1.43× mutagenesis buffer) and 3 μl of a freshly prepared enzyme mixture of dilution buffer (20 mM Tris HCl pH7.5; 10 mM KCl; 10 mM β-mercaptoethanol; 1 mM DTT; 0.1 mM EDTA; 50% glycerol), native T7 DNA polymerase (0.025 U/μl), and T4 DNA ligase (1 U/μl) in a ratio of 1:10, respectively. Reactions were incubated at 37° C. for 1 h before inactivation of T4 DNA ligase at 72° C. during 15 min.

[0504] In order to eliminate the parental plasmid, 30 μl of a mixture containing 1× enzyme buffer and 10 U of restriction enzyme (EcoRI) was added to the mutagenic reactions followed by incubation at 37° C. for at least 3 hours. Next, 90 μl aliquots of XLmutS competent cells (Stratagene) containing 25 mM β-mercaptoethanol were place in ice-chilled deep-well plates. Then, plates were incubated on ice for 10 min with gentle vortex every 2 min. Transformation of XL-mut competent cells was performed by adding aliquots of the restriction reactions ( 1/10 of reaction volume) and incubating on ice for 30 min. A heat pulse was performed in a 42° C. water bath for 45 s, followed by incubation on ice for 2 minutes. Preheated SOC medium (0.45 ml) was added to each well and plates were incubated at 37° C. for 1 h with shaking. In order to enrich for mutated plasmids, 1 ml of 2×YT broth medium supplemented with 100 μg/ml ampicillin was added to each transformation mixture followed by overnight incubation at 37° C. with shaking. Plasmid DNA isolation was performed by alkaline lysis using Nucleospin Multi-96 Plus Plasmid Kit (Macherey-Nagel) according to the manufacturer's instructions. Selection of mutated plasmids was performed by digesting 500 μg of plasmid preparation with 10 U of selection endonuclease in an overnight incubation at 37° C. A fraction of the digested reactions ( 1/10 of the total volume) was transformed into 40 μl of Epicurian coli XL1-Blue competent cells (Stratagene) supplemented with 25 mM β-mercaptoethanol.

[0505] Transformation was performed was as described above. Transformants were selected on LB-ampicillin agar plates incubated overnight at 37° C. Isolated colonies were picked up and grown overnight at 37° C. into deep-well plates. Four clones per reaction were screened by endonuclease digestion of a new restriction site (EcoRV) that was introduced by the selection primer. The cDNA from the selected mutant clones was sequenced to confirm the presence of the mutations.

B. Mature IFN-α-2b and IFN-α-2b(E41Q) for Prokaryotic Expression

[0506] Nucleic acid encoding the mature form of IFN-α-2b was cloned and codon-optimized by site-directed mutagenesis. The codon-optimized IFN-α-2b DNA was then used a template to generate the IFN-α-2b(E41Q) variant, which could be expressed in prokaryotic cells.

[0507] 1. Cloning of Mature IFN-α-2b for Prokaryotic Expression

[0508] To express IFN-α-2b in E. coli, cDNA encoding the mature form of IFN-α-2b (SEQ ID NO: 2079) was initially cloned into the pTOPO-TA vector (Invitrogen) before being codon optimized. The codon-optimized mature IFN-α-2b sequence was then cloned into pET11 (Novagen; SEQ ID NO: 2183), and then subcloned into a pET24 vector that had been modified by removal of the f1 region and His-tag.

[0509] Briefly, the mature IFN-α-2b cDNA was amplified by PCR from pAAV-EcoRI-IFN-α-2b (described above) using Herculase DNA-polymerase (Stratagene) and the following primers:

Seq IFNA forward primer:

(SEQ ID NO: 2083)

5′-AACATATGTGTGATCTGCCTCAAACCCACAGCCTGGGTAGC-3′
Seq IFNA reverse primer:

(SEQ ID NO: 2084)

5′-AAGGATCCTCATTCCTTACTTCTTAAACTTTCTTGCAAGTTTG
TTG-3′

[0510] The resulting PCR product was cloned into pTOPO-TA vector (Invitrogen) to generate pTOPO-IFN-α-2b mature. The sequence was verified through sequencing using the M13 forward primer. The pTOPO-IFN-α-2b mature vector DNA was digested with NdeI and BamHI and the resulting fragment was subcloned into pET11 (Novagen; SEQ ID NO: 2183) to generate pET11-IFN-α-2b. The DNA sequence of the resulting pET11-IFN-α-2b construct was verified through sequencing.

[0511] a. Codon Optimization

[0512] In order to achieve maximum protein expression levels in E. coli, codon optimization was performed on the mature IFN-α-2b transcript using the QuikChange Site-Directed mutagenesis kit (Stratagene; described above). The sequences encoding the arginines at amino acid positions 12, 13, 22, 23 and 33 of the mature IFN-α-2b sequence set forth in SEQ ID NO: 2079 were mutated such that an optimal “CGT” arginine codon was introduced at each site. The sequence encoding the proline at amino acid position 39 was mutated such that a “CCG” proline codon was introduced. The stop codon also was optimized by mutagenesis, replacing the endogenous sequence with a “TAA” stop codon. The codon optimization was performed in a series of four mutagenic reactions, in which the mutagenized plasmid from the previous reaction was used a template for the next reaction. E. coli clones containing the mutagenized plasmids were screened after each step to select one containing the new mutation(s). The plasmid DNA of the selected clone was then isolated and used a a template in the next reaction. Thus, new mutations were introduced during each reaction until the final mature IFN-α-2b sequence contained 8 optimized codons.

[0513] The first site-directed mutagenesis was performed to optimize the codons encoding the arginine residues at amino acid positions 12 and 13 of the mature IFN-α-2b sequence. The pTOPO-IFN-α-2b mature plasmid DNA was used as the template, with the following primers:

ARG12/13-5′:

(SEQ ID NO: 2085)

CACAGCCTGGGTAGCCGTCGTACCTTGATGCTCCTGGC
ARG12/13-3′:

(SEQ ID NO: 2086)

GCCAGGAGCATCAAGGTACGACGGCTACCCAGGCTGTG

[0514] Following screening, the clone designated A1 was selected and used as a template for the second site-directed mutagenesis reaction. This reaction was performed to optimize the codons encoding the arginine residues at amino acid positions 22 and 23 of the mature IFN-α-2b sequence, and used the following primers:

ARG22/23-5′:

(SEQ ID NO: 2087)

ATGCTCCTGGCACAGATGCGTCGTATCTCTCTTTTCTCCTGC
ARG22/23-3′:

(SEQ ID NO: 2088)

GCAGGAGAAAAGAGAGATACGACQCATCTGTGCCAGGAGCAT

[0515] Following screening, the clone designated A1a2 was selected and used as a template for the third site-directed mutagenesis reaction. This reaction was performed to optimize the codons encoding the arginine residue at amino acid position 33 and the praline residue at amino acid position 39 of the mature IFN-α-2b sequence, and used the following primers:

ARG33/PRO39-5′:

(SEQ ID NO: 2089)

CTCCTGCTTGAAGGACCGTCATGACTTTGGATTTCCGCAGGAGGAG
TTTGGC
ARG33/PRO39-3′:

(SEQ ID NO: 2090)

GCCAAACTCCTCCTGCGGAAATCCAAAGTCATGACGGTCCTTCAAG
CAGGAG

[0516] Following screening, the clone designated A1a2b34 clone was selected. The plasmid was named pTOPO-IFN-α-2b-MUT4 and was used in the final site-directed mutagenesis reaction in which the IFN-α stop codon was modified. The following primers were used in this reaction:

(SEQ ID NO: 2091)

| | |
|---|---|
| IFNATAA5′: | GTTTAAGAAGTAAGGAATAAGGATCCTTAAGGGCG |

(SEQ ID NO: 2092)

| | |
|---|---|
| IFNATAA3′: | CGCCCTTAAGGATCCTTATTCCTTACTTCTTAAAC |

[0517] The resulting plasmid containing 8 optimized codons was designated pTOPO-IFN-α-2b-MUT4MUTSTOP3.

[0518] b. Cloning of the Codon-Optimized IFN-α-2B Sequence into pET24

[0519] The codon-optimized IFN-α-2b cDNA (IFN-α-2b-MUT4MUTSTOP3) was cloned into the expression vector, pET24a(+) (Novagen; SEQ ID NO: 2069), for prokaryotic expression of the mature polypeptide. Prior to cloning, however, the His-tag region was removed from the pET24a(+) vector. Following cloning of IFN-α-2b-MUT4MUTSTOP3 into pET24a(+), the f1 origin of replication also was removed.

[0520] The His-tag region in pET24a(+) is flanked by BlpI and XhoI restriction sites. The pET24a(+) vector was digested with BlpI and XhoI to removed the His-tag, and the remaining 5.2 kb DNA fragment was treated with Klenow fragment of DNA polymerase I to create blunt ends. Following purification, the 5.2 kb DNA fragment was religated to form pET24aΔHis1. IFN-α-2b-MUT4MUTSTOP3 was introduced into pET24aΔHis1 by first digesting pTOPO-IFN-α-2b-MUT4MUTSTOP3 with NdeI and BamHI and isolating the 500 bp fragment. The pET24aΔHis1 plasmid also was digested with NdeI and BamHI, and the 500 bp fragment containing IFN-α-2b-MUT4MUTSTOP3 was inserted into the plasmid by ligation. The resulting plasmid was designated pET24aΔHis1-IFN-α-2b-MUT4MUTSTOP1.

[0521] Two SpeI sites flanking the f1 origin of replication in pET24aΔHis1-IFN-α-2b-MUT4MUTSTOP1 were introduced by QuikChange site-directed mutagenesis to facilitate removal of this region. The first reaction used pET24aΔHis1-IFN-α-2b-MUT4MUTSTOP1 as the template, and the first SpeI site was introduced using the following primers:

(SEQ ID NO: 2093)

| | |
|---|---|
| 1SPEI5′: | GCTGAAAGGAGGAACTAGTTCCGGATTGGCGAATGG |

(SEQ ID NO: 2094)

| | |
|---|---|
| 1SPEI3′: | CCATTCGCCAATCCGGAACTAGTTCCTCCTTTCAGC |

[0522] The resulting pET24aΔHis1-IFN-α-2b-MUT4MUTSTOP1Mut1SpeIC11 clone was then used a template in a second reaction. The following primers were used to introduce the second SpeI site:

(SEQ ID NO: 2095)

| | |
|---|---|
| 2SPEI5′: | CAATTTCAGGTGGCACTAGTCGGGGAAATGTGCGC |

(SEQ ID NO: 2096)

| | |
|---|---|
| 2SPEI3′: | GCGCACATTTCCCCGACTAGTGCCACCTGAAATTG |

[0523] The resulting pET24aΔHis1-IFN-α-2b-MUT4MUTSTOP1Mut1+2SpeI Cln^{o}3B plasmid was digested with SpeI to remove the f1 replication of origin. The remaining 5.2 kb DNA fragment was purified and religated. The resulting pET24aΔHis1-IFN-α-2b-MUT4MUTSTOP1Mut1+2SpeI Cln^{o}3B plasmid was sequenced completely using the T7 primer at the following 10 primers:

| | |
|---|---|
| IFNAT71: | |
| CTG GGA GGT TGT CAG AGC | (SEQ ID NO: 2097) |
| pET24T72: | |
| ACC ATG AGT GAC GAC TG | (SEQ ID NO: 2098) |
| pET24T73: | |
| CCC GAC ATT ATC GCG AGC | (SEQ ID NO: 2099) |
| pET24T74: | |
| TCA AGA CGA TAG TTA CCG | (SEQ ID NO: 2100) |
| pET24T75: | |
| CTC CTT ACG CAT CTG TGC | (SEQ ID NO: 2101) |
| pET24T76: | |
| TAC TGA TGA TGA ACA TGC | (SEQ ID NO: 2102) |
| pET24T77: | |
| TCA TCG TCG CGC TCC AGC | (SEQ ID NO: 2103) |
| pET24T78: | |
| ATC CGC ACC AAC GCG CAG | (SEQ ID NO: 2104) |
| pET24T79: | |
| TCG TTC TAC CAT CGA CAC | (SEQ ID NO: 2105) |
| pET24T710: | |
| GCA TGC AAG GAG ATG GCG | (SEQ ID NO: 2106) |

[0524] Following verification of the sequence, the plasmid was designated pET24NAUT-IFN-α-2b-WT.

[0525] The pET24NAUT-IFN-α-2b-WT plasmid was transformed into competent BLR(DE3) E. coli cells (Novagen) and 40% glycerol stock culture of BLR/pET24NAUT-IFN-α-2b-cells was generated and stored in a cryotube at −80° C.

[0526] 2. Generation of the IFN-α-2b(E41Q) Variant

[0527] To generate the IFN-α-2b(E41Q) variant, glutamic acid codon was substituted with a glutamine codon at the nucleic acid sequence that encodes for amino acid position 41 of the sequence set forth in SEQ ID NO: 2067. This was achieved using the QuikChange Site-Directed Mutagenesis kit (Stratagene) with pET24NAUT-IFN-α-2b(E41Q) vector DNA as the template and the following primers:

(SEQ ID NO: 2107)

| | |
|---|---|
| E41QMUT4: | GACTTTGGATTTCCGCAGCAGGAGTTTGGCAACCAG |

(SEQ ID NO: 2108)

| | |
|---|---|
| E41QMUT4C: | CTGGTTGCCAAACTCCTGCTGCGGAAATCCAAAGTC. |

[0528] One of the resulting clones, pET24NAUT-IFN-α-11c, was selected and the plasmid was designated pET24NAUT-IFN-α-2b(E41Q) (SEQ ID NO: 2068). The pET24NAUT-IFN-α-2b(E41Q) DNA was then transformed into competent BLR(DE3) E. coli cells (Novagen). The BLR/pET24NAUT-IFN-α-2b(E41Q) cells were grown in YP broth and a 40% glycerol stock was generated and stored at −80° C. The BLR/pET24NAUT-IFN-α-2b(E41Q) cells also were grown in LB broth to generate a 40% glycerol stock that was stored at −80° C.

### Example 3

### Laboratory-Scale Production of IFN-α-2b(E41Q)

[0529] For the production of IFN-α-2b(E41Q) for initial toxicology studies, the BLR/pET24NAUT-IFN-α-2b(E41Q) cells were cultured in LB medium (LB Broth Base powder (Lennox L Broth Base), 5 g/L NaCl, 10 g/L Select Peptone 140 (pancreatic digest of casein), 5 g/L Select Yeast Extract autolyzed low sodium (Invitrogen)). For subsequent studies, the BLR/pET24NAUT-IFN-α-2b(E41Q) cells were cultured in YP medium (1% Yeast Extract (Bio Springer), 2% A3 Soybean Peptone (Organotechnie), 2% NaCl (Sigma)). The IFN-α-2b(E41Q) protein was then purified from the culture, solubilized and refolded. Additional purification steps using chromatographical techniques were performed before a final filtration step to obtain purified IFN-α-2b(E41Q) protein.

[0530] 1. Culture of 1 L Batch and Over-Expression Induction of IFN-α-2b(E41Q)

[0531] A cryotube containing the glycerol stock of the BLR/pET24NAUT-IFN-α-2b(E41Q) cells (previously grown in LB broth) was cultured in 300 mL LB supplemented with 30 μg/mL kanamycin (Sigma) for 15-16 h at 37° C. A 1 liter solution of LB/kanamycin was inoculated with a volume of pre-culture sufficient to reach OD₆₀₀ₙₘ=0.07 and grown at 37° C. When the culture reached OD₆₀₀ₙₘ=0.6 (estimated 8.70×10⁶ cells/mL), over-expression of IFN-α-2b(E41Q) was induced by adding 250 μl of 2 M IPTG (Amersham). The induced culture was grown for an additional 3 h at 37° C. The estimated doubling time was 45 min. The final OD₆₀₀ₙₘ was 1.8 to 2.2 with an estimated yield of approximately 30 to 40 mg/L. The culture was centrifuged at 4° C., 5,000×g, for 15 min, and the bacterial pellet was harvested and stored at −20° C.

[0532] 2. Purification

[0533] The IFN-α-2b(E41Q) protein was initially purified from the cell lysate then solubilized and refolded. Anion-exchange chromatography, hydrophobic interaction chromatography and size-exclusion chromatography were performed before a final filtration step to obtain purified IFN-α-2b(E41Q) protein.

[0534] A. Cell Removal, Separation and Disruption

[0535] The bacterial pellet was thawed at room temperature prior to mechanical lysis. The thawed cells were resuspended in lysis buffer (lysozyme, 10 mM CaCl₂ and 1 U/mL DNase I) and sonicated for 8 min on ice. The lysate was centrifuged at 4° C., 10,000×g, for 30 min. The supernatant was removed and the pellet was stored at −20° C. The yield of this step was 99% and the purity was estimated to be 60%.

[0536] Due to the over-expression in E. coli and the hydrophobic nature of the protein, IFN-α-2b(E41Q) protein accumulated in inclusion bodies upon bacterial lysis. The frozen lysate pellet containing the inclusion bodies was thawed at room temperature. Lipid contaminants were removed from the inclusion bodies with two consecutive washing steps (each wash step was repeated twice). In the first washing step, the inclusion bodies were resuspended in 0.5% Triton X100 (Carlo Erba) and homogenized using an UltraTurrax homogenizer at 4,000 rpm for 8 sec. The homogenized sample was centrifuged at 4° C., 8,000×g for 30 min and the supernatant was removed. In the second washing step, the inclusion bodies were resuspended in 5% glycerol (Sigma) and homogenized using an UltraTurrax homogenizer at 4,000 rpm for 8 sec. The homogenized sample was centrifuged at 4° C., 8,000×g for 30 min and the supernatant was removed. The pellet was resuspended in 5% glycerol and stored at −20° C. The yield after the two washing steps was 95% and the purity was estimated to be 70%.

[0537] A final washing step was performed by mixing IFN-α-2b(E41Q) protein with an equal volume 6 M guanidinium chloride (Merck). The mixture was vortexed for 30 seconds and centrifuged at 13,000×g for 10 minutes, producing a yield of 95% with an estimated purity of 75%. The yield was estimated by comparing the recovery yield between total protein and IFN-α-2b(E41Q) (OD₂₈₀), while the purity was estimated by a combination of Coomassie Blue and silver nitrate stained SDS-PAGE. Additionally, the integrity of the protein was verified through antiviral specific activity assays as described in Example 1. These methods for determining yield, purity and integrity also were used in the subsequent purification steps described below.

[0538] b. IFN-α-2b(E41Q) Solubilization and Refolding

[0539] The inclusion bodies were denatured for 30 minutes in denaturation buffer (6 M guanidinium chloride) a 5:1 ratio by volume. The protein diluting in 50 times the volume of renaturation buffer (50 mM Tris pH 8.0, 10 mM EDTA, 0.2 M L-Arg (Sigma) and 5% glycerol) to effect refolding. The excess guanidinium chloride was removed by a first dialysis step in 20 times the volume of renaturation buffer for 15-16 hours, followed by a second dialysis in 80 times the volume 10 mM Tris buffer pH 8.0 for 2.5 hours at 4° C. (repeated twice) and subsequent filtration with a 0.45 μm PES membrane. The yield and purity following these steps were both estimated to be around 85%.

[0540] c. Chromatographic Purification Steps

[0541] Following the solubilization and refolding steps described above, IFN-α-2b(E41Q) was further purified through chromatography. The first chromatographic step was done using a 20 mL anion exchange column (AEX) Q Sepharose FF (Amersham) at a 120 cm/h flow rate, at 4° C. The column was equilibrated with 5 column volumes (CV) of 50 mM Tris pH 8.5. After the sample was loaded, the column was washed with 4 CV of 50 mM Tris pH 8.5. The first elution was performed with 3 CV of a 50 mM Tris pH 8.5, 200 mM NaCl solution. A second elution was performed with 2 CV of a 50 mM Tris pH 8.5, 1 M NaCl solution. Regeneration was performed with 5 CV of 1 M NaOH followed by a wash step with 3 CV of 50 mM Tris pH 8.5. The purity after the first chromatographic step was estimated to be 90%. The first elution fraction was stored at 4° C. for immediate use (i.e. less than 1 week) or at −20° C. for extended periods (i.e. greater than 1 week).

[0542] The second chromatographic step was done using a 5 mL Hydrophobic Interaction Column (HIC) Hi Trap Phenyl Sepharose HP (Amersham) at a 180 cm/h flow rate, at 4° C. The column was equilibrated with 5 CV of 50 mM Tris pH 8.5, 0.8 M (NH₄)₂SO₄. After the sample was loaded, the column was washed with 4 CV of 50 mM Tris pH 8.5, 0.8 M (NH₄)₂SO₄. The first elution was performed with 8 CV of 50 mM Tris pH 8.5, 0.4 M (NH₄)₂SO₄. A second elution was performed with 4 CV of 50 mM Tris pH 8.5. Regeneration was performed with 5 CV of 1M NaOH followed by a wash step with 3 CV of 50 mM Tris pH 8.5, 0.8 M (NH₄)₂SO₄. This chromatographic step removed traces of endotoxins and DNA, giving an estimated purity of 95%. The first elution fraction was stored at 4° C. for immediate use (i.e. less than 1 week) or at −20° C. for extended periods (i.e. greater than 1 week).

[0543] In order to control the level of acetylated protein in the final material, an LP-AEX chromatographic improvement step was introduced after the second chromatographic step. This acylation control step was set up with a 1 mL AEX Q HP column (Amersham) at a 1.27 cm/min flow rate, in a 20 mM Tris pH 8.5 at 20° C. A washing step of 0.2 CV was done with the same buffer. A first gradient was operated between 20 mM Tris pH 8.5 and 20 mM Tris pH 7.2 for 10 CV. A second gradient was operated between 20 mM Tris pH 7.2 and 20 mM bis-Tris pH 6.0 for 20 CV, followed by application of 60 CV of 20 mM bis-Tris pH 6.0. Fractionation was operated at a level of 1 CV. IFN-α-2b(E41Q) proteins were pooled until the level of acetylation reached a maximum 10%, as determined by RP-HPLC.

[0544] The third chromatographic step was done using a Size Exclusion Chromatography (SEC) Superdex 75 XK 16/70 column (Amersham) at a 24 cm/h flow rate, at 4° C. The column was equilibrated with 280 mL of 50 mM Tris pH 7.5, 150 mM NaCl. Following equilibration, 0.5 mL of sample (˜1 mg/mL) was loaded onto the column and IFN-α-2b(E41Q) proteins were harvested between 76 min and 85 min (elution peak between 0.6 CV and 0.8 CV). This chromatographic step removed traces of small proteins having the same isoelectric point and hydrophobicity properties as those of IFN-α, giving an estimated purity of 97%.

[0545] d. Final Purification

[0546] In the final purification stage, the liquid bulk was filtered using a 0.22 μm PES membrane, concentrated to between 0.4 mg/mL to 0.6 mg/mL IFN-α-2b(E41Q) using the Centricon Plus-80 system (Millipore), and stored at 4° C. for immediate use (<1 week) or at −20° C. (>1 week). This purified liquid substance was used in the subcutaneous toxicology studies for IFN-α-2b(E41Q) described in Examples 8, 15, 16.B.3, 16.C.1-2, 17.A-B, 18.A-C.

[0547] Additional 4, 10, and 12 L batches of IFN-α-2b(E41Q) liquid culture were generated for use in other animal investigations (see Examples 9a, 16.A.3). The methods for expression and purification of IFN-α-2b(E41Q) from these batches were identical to the methods for expression and purification of the 1 L batch described above, with the exception that the SEC chromatographic step was omitted prior to final purification. In addition, three native IFN-α-2b batches of 4, 10 and 11 L were produced and partially purified (without the SEC step) according to the procedures above. The various lab-scale batches of IFN-α-2b(E41Q) and native IFN-α-2b are summarized in Table 30 below.

TABLE 30
Laboratory-scale batches of IFN-α-2b(E41Q) and Native IFN-α-2b

| | | Starting | | | |
|---|---|---|---|---|---|
| | | Culture | Production | Drug | Used in |
| Product | Batch No. | Volume | Method | Form | Examples: |
| IFN-α- | IFN 001- | 4 L | Lab-scale; | Liquid | 8, 15, |
| 2b(E41Q) | 05; IFN | | Complete | | 16.B.3, |
| | 003-05 | | purification | | 16.C.1-2, |
| | | | | | 17.A-B, |
| | | | | | 18.A-C |
| IFN-α- | IFN 005- | 4 L | Lab-scale; | Liquid | 9 |
| 2b(E41Q) | 05 | | Partial | | |
| | | | purification | | |
| IFN-α- | IFN 007- | 10 L | Lab-scale; | Liquid | 9 |
| 2b(E41Q) | 05 | | Partial | | |
| | | | purification | | |
| IFN-α- | IFN 008- | 12 L | Lab-scale; | Liquid | 16.A.3 |
| 2b(E41Q) | 05 | | Partial | | |
| | | | purification | | |
| IFN-α-2b | IFN 004- | 4 L | Lab-scale; | Liquid | 9 |
| | 05 | | Partial | | |
| | | | purification | | |
| IFN-α-2b | IFN 006- | 10 L | Lab-scale; | Liquid | 9 |
| | 05 | | Partial | | |
| | | | purification | | |
| IFN-α-2b | IFN 002- | 11 L | Lab-scale; | Liquid | 8, 9, 11, |
| | 06 | | Partial | | 20.C |
| | | | purification | | |

### Example 4

### Preparation of IFN-α-2b(E41Q) for Pre-Clinical and Clinical Use

[0548] IFN-α-2b(E41Q) was prepared from BLR/pET24NAUT-IFN-α-2b(E41Q) cells for pre-clinical and clinical use according to the procedures described below. Using pharmaceutical quality materials, the scaled-up production of IFN-α-2b(E41Q) for pre-clinical and clinical use resulted in a final product suitable for use in humans. The methods for master cell bank (MCB) production, fermentation, biomass harvest, bacterial lysis, inclusion body (IB) treatment, purification of IFN-α-2b(E41Q) and liquid bulk formulation of IFN-α-2b(E41Q) for pre-clinical and clinical use are described below.

[0549] 1. Master Cell Bank (MCB) Production Process

[0550] Six YP agar/kanamycin (30 μg/mL) plates were inoculated with BLR/pET24NAUT-IFN-α-2b(E41Q) YP glycerol stock (see Example 2B). After incubation on plates for 15-30 h at 37° C., one single colony was transferred from the plate into 450 mL YP/Kanamycin (30 μg/mL) medium. The culture was incubated at 37° C. for 8-12 h, until OD₆₀₀ₙₘ=2.0±0.3 was reached. Cells were harvested by adding cryopreservation media to a final concentration of 15% (v/v) and aliquoted in 1 mL samples into 240 labeled vials. The MCB aliquots were cryopreserved using a controlled rate freezer, and the vials were transferred to storage below −70° C. in vapor phase liquid nitrogen.

[0551] 2. Fermentation

[0552] Large quantities of BLR/pET24NAUT-IFN-α-2b(E41Q) cells were grown by fermentation. For pre-culture, a frozen MCB aliquot was thawed and 830 μl was mixed with 40 mL YPN 2× growth medium (1% Yeast Extract, 2% Soybean Peptone, 2% NaCl), and 8 mL aliquots were distributed into 5×500 mL shake flasks. The flasks were then incubated with agitation at 250 rpm at 35° C. for about 17 h.

[0553] For batch culture, 100 L YPN 2× growth medium in a B. Braun Biotech International 150 L bioreactor was inoculated with the pre-culture at a starting OD₆₀₀ₙₘ=0.007. The fermentation proceeded at 37° C. approximately 7.30 h, and was performed at constant agitation (500 rpm), 50 L/min air flow, high sensitivity anti-foam, without antibiotics and without the use of pO₂ and pH regulation.

[0554] When OD₆₀₀ₙₘ reached a value of 3.2±0.5, the expression of IFN-α-2b(E41Q) was induced by the addition of 100 mL of 0.5 M IPTG (induction agent).

[0555] 3. Harvest of Biomass

[0556] At 3 h post-induction, the culture was harvested and the biomass separated from the medium by tangential flow filtration (TFF) through hollow fibers (Amersham UFP-500-E-55, 2.1 m², NMWC 500,000) using a Watson-Marlow 704 U/R high flow peristaltic pump (equipped with a second pump head RX 701, in/out manometers, and an auxiliary low flow peristaltic pump). Specifically, the bacterial suspension was first concentrated 20-25 times, and then diafiltrated at constant volume against 4 to 5 volumes of 10 mM Tris 1 mM EDTA pH 8.0. The circuit was rinsed with 10 mM Tris 1 mM EDTA pH 8.0 and the rinse solution was pooled with the diafiltrated biomass. The harvest operation was performed at room temperature. The diafiltrated biomass (10±2 L) was transferred in one bag and stored at −20° C. until the lysis step.

[0557] 4. Bacterial Lysis

[0558] A mechanical lysis step was performed to extract the IFN-α-2b(E41Q) protein from the bacterial cells. The bacterial biomass was thawed for 36 to 72 h at 4° C. or at room temperature. The biomass volume was adjusted to 12 L by addition of 10 mM Tris +1 mM EDTA, pH 8.0. In order to disrupt aggregates and reduce the viscosity of the suspension, the biomass was vigorously homogenized by means of an Ultra-Turrax T50 homogenizer for 15 min at 10,000 rpm. Bacterial cells were then mechanically disrupted by three runs through a Panda 2K cell disrupter at 750 bars. The resulting bacterial lysate was centrifuged for 30 min at 10° C. and 15,000×g. The supernatant was removed and the resulting pellets of inclusion bodies were either stored at 4° C. for less than 24 h or frozen at −20° C. until the next purification step.

[0559] 5. Inclusion Body (IB) Treatment

[0560] a. IB Wash

[0561] In order to remove lipid contaminants, the inclusion body (IB) pellets were subjected to four wash steps. The IB pellets were resuspended in 0.5% Triton X100 and centrifuged for 25 min at 4° C. and 15,000×g. The pellets were harvested and the supernatant was removed. A second wash with 0.5% Triton X100 was performed, followed by an additional two washes with 5% glycerol.

[0562] After the fourth wash, the pellets were resuspended in 400 mL of 5% glycerol and divided into two sets of the same volume (dispensed into two plastic biotainers). Both suspensions were stored at −20° C. until the next purification step. The storage was typically about one month.

[0563] b. Denaturation of the IB and Renaturation of IFN-α-2b(E41Q)

[0564] In order to release the protein from the inclusion bodies, it was necessary to perform a denaturing step followed by a renaturing step to refold the protein. The following steps were performed successively on each IB suspension biotainer stored at −20° C. The IB suspension was diluted with denaturation buffer (6 M guanidinium chloride, 50 mM Tris 10 mM EDTA, 2 mM DTT, pH 8.0) to reach a volume that was 100 times greater than the weight of IB. The solution of denatured IB was then incubated under agitation for 1 hr at room temperature. The IB solution was added to the renaturation buffer (0.2 M L-Arginine, 50 mM Tris, 10 mM EDTA, 5% glycerol, pH 8.0) at a flow rate of 25 mL/min (dilution 1/50). The solution was incubated under agitation at 4° C. overnight.

[0565] c. Concentration and Diafiltration of the Renatured Protein Solution

[0566] Concentration and diafiltration were performed at 4° C. by tangential flow filtration (TFF), using a peristaltic pump, 2 manometers and a Pellicon®2 “Maxi” Filter Biomax PES membrane (EFA: 2.5 m², cut off: 10 kDa).

[0567] The membrane was first rinsed with WFI (water for injection), then with 10 L of 0.1 M NaOH without recirculation. Membrane sanitization was performed using 10 L of 0.1 M NaOH with a 2 hr duration of contact. The system was then purged of 0.1 M NaOH and rinsed with 20 L of 20 mM NaOH for 5 min. The system was purged of 20 mM NaOH and rinsed with 10 L of renaturation buffer without recirculation. The system was equilibrated with 10 L of renaturation buffer until the permeate reached pH 8.0. Residual particles in the renatured protein solution were eliminated by filtration using a 0.45 μm and 0.2 μm Sartopore 2 filter capsule (EFA=0.2 m², PES membrane, Sartorius). The clarified solution was concentrated 5 to 10 times, depending on the turbidity of the retentate. The solution was then exchanged against 5 volumes of 20 mM Tris pH 8.0. Pressure conditions were set in order to get a trans-membrane pressure of 0.5 bar and a flow rate of the permeate of between 0.3 and 1 L/min.

[0568] At the end of the diafiltration, the retentate was harvested and the TFF system was washed with 3-5 L of 20 mM Tris pH 8.0 which was added to the retentate solution. Residual precipitates were eliminated by filtration using a 0.45 μm and 0.2 μm Sartopore 2 filter capsule (EFA=0.45 m², PES membrane, Sartorius). The clarified solution was stored at 4° C. until proceeding to purification steps.

[0569] 6. Purification

[0570] In order to increase the purity of the IFN-α-2b(E41Q) solution, seven purification steps were performed as described below. The chromatography system used for the purification steps of IFN-α-2b(E41Q) was an Akta Pilot from Amersham.

[0571] a. Step 1: Anion Exchange Chromatography (AEX)

[0572] The first purification step was conducted at 4° C., using a Q Sepharose FF resin, packed with WFI in a BPG100 column at a flow rate of 240 mL/min. Characteristics of the resin were as follows: section: 78.5 cm²; height: 15 cm; volume: 1,965 cm³. A flow rate of 200 mL/min was used for the loading, washing, elution and regeneration steps.

[0573] Before use, the column was sanitized with 2 column volumes (CV) of 1 M NaOH for 2 h followed by 2-3 CV of 20 mM NaOH with a flow rate of 200 mL/min. The column was stored in 20 mM NaOH until use (maximum of 28 days at 4° C.).

[0574] The column was equilibrated with 2-3 CV of 20 mM Tris 1 M NaCl pH 8.0 followed by 2-3 CV 20 mM Tris pH 8.0. IFN-α-2b(E41Q) solution was loaded onto the column followed by a wash step with 3-4.5 CV of 20 mM Tris, pH 8.0. The protein was first eluted with 2.5-3.5 CV of a solution containing 20 mM Tris and 100 mM NaCl, pH 8.0, followed by a second elution with 2.5-7.5 CV of a solution containing 20 mM Tris, 150 mM NaCl, pH 8.0. The column was washed with 2.5-3.5 CV of 20 mM Tris, 200 mM NaCl, pH 8.0, regenerated with 2.5-3.5 CV of 20 mM Tris +1 M NaCl, pH 8.0, and re-sanitized according to the above-mentioned procedure. The product of wash and elution were stored at 4° C. for 1-5 days.

[0575] b. Step 2: Hydrophobic Interaction Chromatography (HIC)

[0576] The second purification step was conducted at 4° C., using a Phenyl Sepharose FF resin, packed with WFI in a BPG100 column at a flow rate of 240 mL/min. Characteristics of the resin were as follows: section: 78.5 cm²; height: 20 cm; volume: 1,570 cm³. A flow rate of 200 mL/min was used for the loading, washing, elution, regeneration and sanitization steps.

[0577] Before use, the column was sanitized with 2 column volumes (CV) of 1 M NaOH for 2 hrs followed by 2-3 CV of 20 mM NaOH with a flow rate of 200 mL/min. The column was stored in 20 mM NaOH until use (maximum 28 days at 4° C.).

[0578] The column was equilibrated with 3-5 CV of a solution containing 20 mM Tris and 0.8 M (NH₄)₂SO₄, pH 8.0. The elution fractions from the previous step (AEX step) were pooled and adjusted to the same conductivity as the equilibration buffer by addition of a solution of 3.4 M (NH₄)₂SO₄. IFN-α-2b(E41Q) solution was loaded onto the column followed by four wash steps: 1) 2-4 CV of 20 mM Tris, 0.8 M (NH₄)₂SO₄, pH 8.0; 2) 3-5 CV 20 mM Tris, 0.6 M (NH₄)₂SO₄, pH 8.0; 3) 3-5 CV of 20 mM Tris, 0.5 M (NH₄)₂SO₄, pH 8.0; and 4) 3-5 CV 20 mM Tris, 0.4 M (NH₄)₂SO₄, pH 8.0. The four wash steps were followed by three elutions: 1) 8-11 CV of 20 mM Tris, 0.3 M (NH₄)₂SO₄, pH 8.0; 2) 4-6 CV of 20 mM Tris, 0.2 M (NH₄)₂SO₄, pH 8.0; and 3) 3-5 CV of 20 mM Tris, 0.1 M (NH₄)₂SO₄, pH 8.0. The three elution steps were followed by three regeneration steps: 1) 3-5 CV of 20 mM Tris, 0.05 M (NH₄)₂SO₄, pH 8.0; 2) 3-5 CV of 20 mM Tris, pH 8.0; and 3) 4-10 CV WFI (water for injection). The column was re-sanitized according to the above-described procedure. The product of elution was stored at 4° C. for 1-5 days until the next purification step (diafiltration).

[0579] c. Step 3: Diafiltration

[0580] The elution fractions from the above HIC purification step were diafiltrated, using a peristaltic pump, 2 manometers and a TFF P2B010A05 cartridge in PES (Millipore, PMNL: 10 kDa, EFA: 0.5 m²) placed in a Pellicon2 XX42P0060 carter. The entire step was conducted at 4° C.

[0581] Before use, the membrane was rinsed with WFI prior to sanitization. The membrane was rinsed again with 5 L of 0.1 M NaOH without recirculation. The sanitization was performed using 10 L of NaOH 0.1 M with for 2 h. The system was purged of 0.1 M NaOH and rinsed with 5 L of 20 mM NaOH for 5 min. The system was then purged of 20 mM NaOH and rinsed with 2 L of 20 mM Tris pH 8.5 without recirculation, after which it was equilibrated with 10 L of 20 mM Tris, pH 8.5, until the permeate reached pH 8.5. The elution fractions from HIC were pooled and diafiltrated against at least 4 volumes of 20 mM Tris, pH 8.5 (=exchange buffer), at a trans-membrane pressure of 0.5 bar.

[0582] At the end of the diafiltration, the retentate was harvested and the TFF system was washed with 1-2 L of 20 mM Tris, pH 8.5, which was added to retentate. The entire system was re-sanitized as described above.

[0583] d. Step 4: LP-AEX Column (Q Sepharose HP)

[0584] The fourth purification step was conducted at room temperature, using a Q Sepharose High Performance (Q HP) resin, packed with WFI in a BPG100 column at a flow rate of 100 mL/min. Characteristics of the resin were as follows: section: 78.5 cm²; height: 12 cm; volume: 943 cm³. A flow rate of 100 mL/min was used for the loading, washing, elution, regeneration and sanitization steps.

[0585] Before use, the column was sanitized with 2 column volumes (CV) of 1 M NaOH for 2 h followed by 2-3 CV of 20 mM NaOH with a flow rate of 100 mL/min and subsequent storage of the column in 20 mM NaOH until use (maximum 28 days at 4° C.).

[0586] The column was equilibrated with 2-5 CV of 20 mM Tris, 1 M NaCl, pH 8.5, followed by 2-3 CV of 20 mM Tris, pH 8.5. The IFN-α-2b(E41Q) solution was loaded onto the column followed by a wash step with 0.5-1.0 CV of 20 mM Tris, pH 8.5. Each elution step was collected in fractions. Samples from each fraction were pooled in order to get pool samples representative of different recovery yields (e.g., 20%, 25%, 30%, 35%, 40%, etc). Then each pool sample was analyzed to determine the acetylation level (specification: <2%). The first elution was performed with a pH gradient in 10 CV from 20 mM Tris, pH 8.5, to 20 mM Tris, pH 7.2, followed by a second elution with a pH gradient in 20 CV from 20 mM Tris, pH 7.2, to 20 mM bis-Tris, pH 5.9. The column was washed with 30 CV of 20 mM bis-Tris, pH 5.9, regenerated with 3-5 CV of 1 M NaCl, and re-sanitized according to the above-mentioned procedure. The product of wash and elution were stored at 4° C. for 1-5 days. All fractions of the first and second elution were stored at 4° C. until needed.

[0587] e. Step 5: Pre-SEC Concentration

[0588] A concentration step was performed using tangential flow filtration (TFF). The elution fractions from the above Q Sepharose HP purification step were pooled in order to get a final acetylation level <2%. The resulting pool step was concentrated using a peristaltic pump, 2 manometers and a TFF P2B005A05 cartridge in PES (Millipore, PMNL: 5 kDa, EFA: 0.5 m²) placed in a Pellicon2 XX42P0060 carter. The entire step was conducted at 4° C.

[0589] Before use, the membrane was rinsed with WFI and rinsed again with 5 L of 0.1 M NaOH without recirculation. Sanitization was performed using 10 L of 0.1 M NaOH for 2 h. The system was purged of 0.1 M NaOH and rinsed with 5 L of 20 mM NaOH for 5 min. The system was purged of 20 mM NaOH and rinsed with 2 L of 20 mM bis-Tris +150 mM NaCl, pH 5.9, without recirculation.

[0590] The system was equilibrated with 10 L of 20 mM bis-Tris +150 mM NaCl, pH 5.9, until the permeate reached pH 5.9. The elution fractions from the Q Sepharose HP purification step were pooled and adjusted to 150 mM NaCl by addition of 2 M NaCl in order to decrease the risk of precipitation of the proteins during the concentration. The resulting pool was concentrated to reach a final concentration of about 1 mg/mL, at a trans-membrane pressure of 0.5 bar.

[0591] At the end of the concentration, the retentate was harvested and the TFF system was washed with 0.6 L of 20 mM bis-Tris +150 mM NaCl, pH 5.9, which was added to the retentate. The resulting IFN-α-2b(E41Q) was filtered using a 0.45 μm+0.2 μm cartridge filter (Sartopore 2 filter, 300 cm², Sartorius). The entire system was sanitized as described above.

[0592] f. Step 6: Size Exclusion Chromatography (SEC)

[0593] The sixth purification step was conducted at 4° C., using a Superdex 75 Sepharose resin, packed with WFI in a BPG140 column. Characteristics of the resin were as follows: section: 153.9 cm²; height: 72 cm; volume: 1,108 cm³. A flow rate of 40 mL/min was used for the loading, washing, elution, regeneration and sanitization steps.

[0594] Packing of the resin was performed according to the following procedure. The resin was first packed with a flow rate of 40 mL/min for 1.00-1.30 h. The piston was pulled down and adjusted to 0.5 cm of the gel height. The flow rate was increased to reach a constant pressure of 4.5 bar for 20 min to 1 h. The piston was pulled down onto the gel. Finally, the quality of the packing was tested by measuring the Height Equivalent to the Theoretical Plate (HETP), HETP>1000, and the asymmetry (As), As=0.7-1.7, with 110.8 mL of 1% acetone.

[0595] Sanitization of the column was performed by running 0.5 M NaOH through the column for at least 120 min followed by storage in 20 mM NaOH until next use (max. 28 days at 4° C.).

[0596] The column was equilibrated with 16-18 L SEC buffer (1.69 g/L NaH₂PO₄.2H₂O, 1.8 g/L Na₂HPO₄, 7.5 g/L NaCl and 0.1 g/L EDTA Na₂) with a flow rate of 40 mL/min. 250 mL of IFN-α-2b(E41Q) solution was loaded onto the column followed by elution with the SEC buffer. The elution peak was collected in fractions for analysis. Each collected fraction was analyzed with SDS-PAGE. Only the fractions showing the higher purity level were kept and pooled together.

[0597] After salt elution, the column was sanitized with 0.5 M NaCl according to the above-mentioned procedure. Several runs were necessary to treat the complete bulk of IFN-α-2b(E41Q) (250 mL/run). All fractions were stored at 4° C. until results of purity measurements were obtained.

[0598] g. Step 7: Post-SEC Concentration

[0599] After purity testing, selected fractions from the above SEC purification step were pooled. The resulting pool was concentrated by tangential flow filtration (TFF), using the same system as in Step 5 (i.e. a peristaltic pump, 2 manometers and a TFF P2B005A05 cartridge in PES (Millipore, PMNL: 5 kDa, EFA: 0.5 m²) placed in a Pellicon2 XX42P0060 carter). The entire process was conducted at 4° C.

[0600] Before use, the TFF system was sanitized using 10 L of 0.1 M NaOH for 2 hrs. The system was purged of 0.1 M NaOH and rinsed with 5 L of 20 mM NaOH for 5 min. The system was then purged of 20 mM NaOH and rinsed with 2 L of SEC buffer without recirculation.

[0601] The system was equilibrated with 5 L of SEC buffer until the permeate reached pH 6.7. The selected elution fractions from the SEC purification step were pooled. The resulting pool was concentrated to reach a final concentration of 0.4 mg/mL, at a trans-membrane pressure of 0.5 bar.

[0602] At the end of the concentration, the retentate was harvested and the TFF system was washed with 0.2-0.4 L of SEC buffer which was added to retentate. The entire system was sanitized as described above. The resulting IFN-α-2b(E41Q) was filtered using a 0.45 μm and 0.2 μm cartridge filter (Sartopore 2 filter, 300 cm², Sartorius) and stored at 4° C. until proceeding to the formulation operations (=Purified Bulk).

[0603] 7. Liquid Bulk-Formulation

[0604] The concentration of IFN-α-2b(E41Q) in the concentrated retentate was determined on the basis of the UV absorbance at 280 nm (Extinction Coefficient=0.985). The concentrated retentate was diluted with SEC buffer to obtain a final concentration of IFN-α-2b(E41Q) of 300±60 μg/mL. Sucrose was added to the IFN-α-2b(E41Q) Purified Bulk to get a sucrose concentration of 14.7 mg/mL. The formulated liquid bulk was sterilized by filtration through 0.2 μm using a sterilizing Sartopore 2 capsule (EFA=150 cm², PES membrane, Sartorius). The conditioned filtered Final Bulk was stored at −20° C. before proceeding to one of two lyophilization schemes outlined in Example 5.

[0605] Several batches of IFN-α-2b(E41Q) were produced by the methods described in this Example, including two batches that were lyophilized by the procedure outlined in Example 5.1 below (Method 1) for preparation of an enteric-coated capsule prototype and three batches that were lyophilized by the procedure outlined in Example 5.2 below (Method 2) for preparation of enteric-coated tablets. The various pre-clinical and clinical batches of IFN-α-2b(E41Q) are summarized in Table 31 below.

TABLE 31
Pre-clinical and clinical-scale batches of IFN-α-2b(E41Q)

| | | Starting | | | |
|---|---|---|---|---|---|
| | | Culture | Production | Drug | Used in |
| Product | Batch No. | Volume | Method | Form | Examples: |
| IFN-α- | IFN-001-06 | 100 L | Pre-clinical | Capsule; | 9, 10, 11, |
| 2b(E41Q) | | | (Method 1 | Injectable | 16.A.1-2, 20.B |
| | | | lyophilization) | solution | |
| IFN-α- | IFN 003-06 | 100 L | Pre-clinical | Capsule | n/a |
| 2b(E41Q) | | | (Method 1 | | |
| | | | lyophilization) | | |
| IFN-α- | G055/060118 | 100 L | Clinical | Tablet | 8, 11, 12, |
| 2b(E41Q) | | | (Method 2 | | 16.B.1, 20.A.3 |
| | | | lyophilization) | | |
| IFN-α- | G055/LPC1/060221 | 100 L | Clinical | Tablet | 11, 20.C |
| 2b(E41Q) | | | (Method 2 | | |
| | | | lyophilization) | | |
| IFN-α- | G055/LC1/060330 | 100 L | Clinical | Tablet | n/a |
| 2b(E41Q) | | | (Method 2 | | |
| | | | lyophilization) | | |

### Example 5

### Lyophilized Drug Substance

[0606] A lyophilized powder of IFN-α-2b(E41Q) was produced for the manufacture of enteric-coated capsules. Two methods of lyophilization were employed, as described below.

[0607] 1. Pre-Clinical Batch Lyophilization (Method 1)

[0608] IFN-α-2b(E41Q) pre-clinical batch Nos. IFN-001-06 and IFN 003-06 (Table 31) were used to produce a lyophilized powder for the manufacture of enteric-coated capsule. The liquid bulk solution was filtered through a sterile filter (0.2 μm) using a peristaltic pump and silicone tubing followed by a freezing step at −80° C. for 90 min. The filtered solution was distributed in 5 mL sterile glass vials (about 3 mL per vial). During the primary lyophilization stage, the sample was brought to −30° C. for 60 min until the pressure reached 10 Pa (0.1 mbar). The room temperature was adjusted to 0° C. to facilitate evaporation. Approximately 100 mL of liquid bulk solution was lyophilized for 24 to 30 h. Lyophilization of 1 L solutions takes 3 to 5 days. During the secondary lyophilization stage, the temperature was increased by 5° C. every 20 min to reach 25° C. (room temperature) until the process was complete (6 hrs). The vials were closed with robust freeze-dry stoppers, sealed with aluminum capsule seals, and stored at 4° C.

[0609] Native IFN-α-2b liquid bulk from laboratory-scale batch Nos. IFN-004-05, IFN-006-05 and IFN-002-06 (Table 30) also were lyophilized according to the method above for use as a control in subsequent studies.

[0610] 2. Clinical Batch Lyophilization (Method 2)

[0611] IFN-α-2b(E41Q) batch Nos. G055/060118, G055/LPC1/060221, G055/LC1/060330 (Table 31) were lyophilized for the manufacture of enteric-coated tablets. In addition to the IFN-α-2b(E41Q) protein, the powder contained the following:

TABLE 32

| | | Concentration |
|---|---|---|
| Excipients | Grades | (mg/mL) |
| NaCl | EP, for ACS analysis, ISO | 7.5 |
| Na phosphate dibasic | EP, for ACS analysis | 1.8 |
| Na phosphate monobasic | EP, for ACS analysis | 1.3 |
| EDTA disodium | EP, for ACS analysis, ISO | 0.1 |
| Sucrose | EP | 14.7 |

[0612] Frozen IFN-α-2b(E41Q) liquid bulk solution (stored at ≦−20° C.) was thawed for 26 hrs at room temperature then 14 hrs at 5-8° C., followed by an additional 3 hr incubation at room temperature. The solution was filtered through a Pall KA1DFLP sterile filter (0.2 μm) (Pall) using a peristaltic pump and a silicone tubing and filled directly into autoclaved Lyoguard® trays (WL Gore Associates). Five trays were filled with approximately 600 g solution/tray. In total, the yield of filtered solution was about 3,351 g. Trays were loaded into the freeze-dryer on pre-cooled shelves (−30° C.) and then frozen for 5 hrs.

[0613] The primary stage of the drying process was performed over 89 hrs. The frozen product was dried at −30° C. for 1 ht at 10 Pa (0.1 mbar), then at 0° C. for 1 hr at 10 Pa (0.1 mbar), and finally at 0° C. for 87 hrs at 10 Pa (0.1 mbar).

[0614] The secondary stage of the drying process was performed at a low vacuum at 5° C. for 20 min at 10 Pa (0.1 mbar), then at 5° C. for 1.5 h with the lowest possible pressure (about ≦0.001 mbar). The temperature was raised by 5° C. increments and held at each level for 60-90 min until the temperature reached 25° C. with the lowest possible pressure (about 0.001 mbar). This process took approximately 9 hrs.

[0615] At the end of the freeze-drying cycle, the trays were removed from the freeze-dryer and unloaded. The yield was determined at 88.6 g lyophilizate within the trays. The content of all trays was mixed and the lyophilizate was stored and protected from moisture until the next processing step.

### Example 6

### Manufacture of Tablets, Capsules and Solutions for Injection

[0616] IFN-α-2b(E41Q) was formulated as a solution for injection, an enteric-coated capsule and an enteric-coated tablet, for use in pre-clinical studies and/or clinical studies.

[0617] 1. Solutions for Injection

[0618] IFN-α-2b(E41Q) lyophilized powder from the IFN 001-06 batch (described above) was used to formulate solutions for Per os (PO) and intravenous (IV) administrations in pre-clinical pharmacokinetic (PK) studies (Examples 9, 11). The IFN-α-2b(E41Q) lyophilized powder was resuspended in milliQ water for PO administration, or resuspended in PBS for intravenous administration. The respective amounts of IFN-α-2b(E41Q) lyophilized powder and diluent used to achieve a particular concentration, are provided in Table 33.

TABLE 33
Solutions for Injection

| | | Lyophilized | Volume |
|---|---|---|---|
| | Concentration | IFN-α-2b(E41Q) | (milliQ water) |
| Administration | (mg/mL) | (mg) | (mL PBS) |
| PO | 2.00 | 33.33 | 1 |
| | 1.00 | 16.65 | 1 |
| | 0.75 | 12.50 | 1 |
| | 0.50 | 8.32 | 1 |
| | 0.20 | 3.33 | 1 |
| IV | 0.10 | 1.66 | 1 (mL PBS) |

[0619] For additional studies in rats (see Examples 9, 16.A.3), solutions for injection also were prepared from the laboratory-scale batches of IFN-α-2b(E41Q): IFN 005-05, IFN 007-05 and IFN 008-05 (Example 3, Table 30).

[0620] 2. Enteric-Coated Capsules

[0621] Enteric-coated capsules used in rat and monkey studies (Examples 9, 11, 16.A.1-2, 20B) were manufactured using the IFN-α-2b(E41Q) lyophilized powder from the IFN 001-06 pre-clinical batch. The capsules were filled with the appropriate amount of lyophilized IFN-α-2b(E41Q) and the weight was completed with sucrose. The capsules were enteric-coated for delivery into the intestine, with the coating serving to maintain capsule integrity at an acidic pH. The coating was made of 3 layers of a solution containing cellulose/acetate/phatalate in acetone (12.5% m/v). Each layer was dried separately. Clear Torpac (size 9) and Opaque Capsugel capsules (size 9) were used for the studies.

[0622] IFN-α-2b(E41Q) was formulated in enteric-coated capsules at 4 doses: 0.20 mg, 0.40 mg, 0.60 mg and 0.80 mg. The protein content was determined by OD 280 nm after dilution with PBS. The compositions of the four capsules are described in Table 34.

TABLE 34
Enteric-coated capsules

| | | | IFN-α- |
|---|---|---|---|
| | Unit dose | | 2b(E41Q) |
| Raw materials | (mg) | Capsule type | content (mg) |
| Lyophilized powder | 7.14 | Torpac | 0.20 |
| Mannitol | 21.86 | | |
| Lyophilized powder | 14.81 | Capsugel | 0.40 |
| Mannitol | 6.69 | | |
| Lyophilized powder | 21.75 | Capsugel | 0.60 |
| Lyophilized powder | 29.00 | Torpac | 0.80 |

[0623] The enteric-coating of each of the capsules was evaluated by maintaining the capsules in a solution at pH 1.2 for 1 hr at 37° C. This solution simulated the intestinal fluid environment. The solution and capsules were stirred throughout the incubation, after which the capsules were transferred to PBS and maintained at 37° C. All of the enteric-coated capsules tested showed no visual leaks during the 1 hr exposure to the acidic solution. Disintegration of the enteric-coated capsule was observed within 30 min when the capsule was transferred to PBS.

[0624] 3. Enteric-Coated Tablets

[0625] IFN-α-2b(E41Q) lyophilized bulk (clinical batch No. G055/LC1/060330) was formulated as an enteric-coated capsule at three dosages; 40 μg IFN-α-2b(E41Q)/enteric-coated tablet, 200 μg IFN-α-2b(E41Q)/enteric-coated tablet, and 450 μg IFN-α-2b(E41Q)/enteric-coated tablet.

[0626] The enteric-coated tablets were manufactured by direct compression on an eccentric press. The IFN-α-2b(E41Q) lyophilized powder was first mixed with lactose monohydrate and triturated. Microcrystalline cellulose, povidone and crospovidone were then mixed into the powder, followed by magnesium stearate. The final powder mixture was compressed on an eccentric press using an oblong 11.0×4.4 mm tool that contained a breaking score on one side. The resulting tablet core weight was 150 mg and its size dimensions were 11.0×4.4 mm. The film used for coating the tablet was prepared by mixing isopropylic alcohol, acetone and purified water. Eudragit and triethylcitrate were then dissolved into this mixture. A separate solution of isopropylic alcohol, talc, titanium dioxide and magnesium stearate was prepared, and then the two solutions were mixed together to obtain the coating solution. The tablet cores were then coated with the coating solution until a final weight of 165.7 mg per tablet was obtained.

[0627] The composition of the IFN-α-2b(E41Q) enteric-coated tablet formulated for clinical use is shown in Table 35 below. The purity grades of each of the constituents also are shown (GMP is Good Manufacturing Practice, EP is European Pharmacopeia; USP is United States Pharmacopeia).

TABLE 35
Enteric-coated tablets (batch No. G055/LC1/060330)

| | | Strength 40 | Strength | Strength |
|---|---|---|---|---|
| | | μg/ | 200 μg/ | 450 μg/ |
| | | unit dose | unit dose | unit dose |
| Raw materials | Grades | (mg) | (mg) | (mg) |
| Drug substance: | | | | |
| *Lyophilized IFN-α- | GMP | 10.00 | 30.00 | 60.00 |
| 2b(E41Q) | material | 0.04 | 0.20 | 0.45 |
| Excipients: | | | | |
| *Lactose 1 H20 | EP | 105.80 | 85.80 | 55.80 |
| *Microcrystalline | EP | 27.00 | 27.00 | 27.00 |
| cellulose 0.1 mm | | | | |
| *Povidone (Polyvidone | USP | 1.80 | 1.80 | 1.80 |
| K25) | | | | |
| *Crospovidone | USP | 3.60 | 3.60 | 3.60 |
| *Magnesium stearate | USP | 1.80 | 1.80 | 1.80 |
| Enteric coating: | | | | |
| Eudragit L | USP | 8.40 | 8.40 | 8.40 |
| Thriethylcitrate | USP | 0.84 | 0.84 | 0.84 |
| Talcum micron | EP/USP | 4.20 | 4.20 | 4.20 |
| Titanium dioxide | USP | 1.50 | 1.50 | 1.50 |
| Magnesium stearate | USP | 0.75 | 0.75 | 0.75 |
| Isopropylic alcohol* | USP/EP | 70.00 | 70.00 | 70.00 |
| Acetone* | EP | 70.00 | 70.00 | 70.00 |
| Purified water* | USP | 0.42 | 0.42 | 0.42 |
| Total tablet mass | | 150.0 | 150.0 | 150.0 |

[0628] For use in the studies described in Examples 8, 11, 12, 16.B.1, 20.A.3 below, enteric-coated tablets were manufactured using the IFN-α-2b(E41Q) lyophilized bulk from clinical batch No. G055/060118 at a dose of 600 μg/tablet. The composition of the IFN-α-2b(E41Q) enteric-coated tablets used in these Examples is shown in Table 36 below.

TABLE 36
Enteric-coated tablets (batch No. G055/060118)

| | | Strength 600 μg/ |
|---|---|---|
| Raw materials | Grades | Unit dose (mg) |
| Drug substance: | | |
| *Lyophilized IFN-α-2b(E41Q) | | 51.70 |
| | | 0.60 |
| Excipients: | | |
| *Lactose 1 H20 | EP | 64.10 |
| *Microcrystalline cellulose 0.1 mm | EP | 27.00 |
| *Povidone (Polyvidone K25) | USP | 1.80 |
| *Crospovidone | USP | 3.60 |
| *Magnesium stearate | USP | 1.80 |
| Enteric coating: | | |
| *Eudragit S-100 | USP | 8.40 |
| *Triethylcitrate | USP | 0.84 |
| *Talc | EP/USP | 4.20 |
| *Titanium dioxide | USP | 1.50 |
| *Magnesium stearate | USP | 0.75 |
| *Purified Water | USP/EP | 0.42 |
| *Isopropylic alcohol | EP | 70.00 |
| *Acetone | USP | 70.00 |
| Total tablet mass | | 150.0 |

### Example 7

### Quality Control Results

[0629] Specifications and quality control (QC) data were collected for the clinical batches of IFN-α-2b(E41Q) at four stages of production: 1) purified liquid bulk (Example 4.6); 2) formulated liquid bulk (Example 4.7); 3) lyophilized powder (Example 5.2), and 4) tablet formulation (Example 6.3). Specifications and quality control data also were collected for the enteric-coated capsule prototype (Example 6.2) manufactured from the pre-clinical batch.

[0630] 1. Purified Liquid Bulk Specifications and QC

[0631] Specifications and quality control data for the IFN-α-2b(E41Q) purified liquid bulk substance are shown in Table 37 below.

TABLE 37
Purified liquid bulk specifications and QC

| Analyses | Tests | Specifications |
|---|---|---|
| Appearance | Visual determination | Colorless, clear liquid |
| liquid bulk | | |
| Protein content | OD_{280 nm}, μBCA and RP-HPLC | For information |
| Identity | Peptide mapping | Conform to IFN-α-2b(E41Q) |
| | | pattern |
| | 15 N-terminal amino acid | Conform to reference amino acid |
| | sequence | sequence |
| | Isoelectric pH (IEF) | For information |
| | | (theoretical value: ~6.78/6.34) |
| | Western Blot | 1 specific band between 15 and 20 |
| | | kDa |
| | Molecular Weight by SDS- | 1 major band between 15 and 20 |
| | PAGE silver stain in reducing | kDa |
| | and non-reducing conditions | |
| Purity | SDS-PAGE under reducing and | ≧98% |
| | non-reducing conditions | |
| | Coomassie Blue staining | |
| | SE-HPLC | ≧98% |
| pH | Potensiometric measure | For information |
| Potency | Antiviral activity | ≧3.00 × 10⁸ IU/mg (A549 lung |
| (Texcell) | | cells)* |
| Related impurities | | |
| Acetylated form | RP-HPLC | No more than 2% of acetylated |
| | | IFN-α-2b(E41Q) |
| Aggregates | SE-HPLC | ≦1% |
| DNA content | Picogreen method | <10 ng/dose equiv¹ |
| HCP content | ELISA method | <10 ng/dose equiv¹ |
| GuaCl content | HPLC | <LOD² |
| Contaminants | | |
| detection | | |
| Bacterial | LAL Test/EP method | <10 EU/dose equiv* |
| endotoxins | | |

*Potency determination for the GMP G1 Clinical batch was performed by CPE on A549 lung cells
¹dose equivalent = 100 μg of protein
²LOD = limit of detection

[0632] 2. Formulated Liquid Bulk Specifications and QC

[0633] Specifications and quality control data for the IFN-α-2b(E41Q) formulated liquid bulk substance (after sucrose addition) are shown in Table 38 below.

TABLE 38
Formulated liquid bulk specifications and QC

| Tests | Methods | Specifications |
|---|---|---|
| Appearance | Clarity, color | Colorless, clear liquid |
| Identity | Detection of IFN-α-2b(E41Q) | At least 1 specific band |
| | (Western Blot) | between 15 and 20 kDa |
| | (reducing conditions) | |
| Sterility test | TSB (20-25° C.) | Absence of growth |
| | FTM (30-35° C.) | Absence of growth |
| Abnormal toxicity | In mice | Absence |
| | In guinea-pigs | Absence |
| Endotoxin content | LAL | <10 IU/dose equiv¹ |
| Protein content | OD_{280 nm} | For information |
| | μBCA | 300 ± 60 μg/mL |
| Sucrose content | Spectrometry | 14.7 mg/mL |
| Potency | Antiviral activity | ≧3.00 × 10⁸ IU/mg (A549 lung |
| (Texcell) | | cells) |
| Electrophoretical | SDS-PAGE | 1 major band between 15 and |
| pattern/EP Standard | AgNO₃ - reducing & non- | 20 kDa |
| IFN-α | reducing conditions | |

¹dose equivalent = 100 μg of protein

[0634] 3. Lyophilized Bulk Specifications and QC

[0635] Specifications and quality control data for the IFN-α-2b(E41Q) lyophilized bulk are shown in Table 39 below.

TABLE 39
Lyophilized bulk specifications and QC

| Analyses | Methods | Specifications |
|---|---|---|
| Appearance | Visual determination | White powder |
| Identity | LC-MS (RP-HPLC | Conform to EP pattern |
| (M-Scan, Switzerland) | and Mass | |
| | spectrometry on the | |
| | intact protein) | |
| | Peptide mapping | Conform to EP pattern |
| Strength | LC-UV | 0.9% (w/w) ± 0.1% |
| (M-Scan, Switzerland) | | |
| Purity | RP-HPLC | >98% |
| (M-Scan, Switzerland) | | |
| Dimers and HMW | RP-HPLC | ≦2% |
| (M-Scan, Switzerland) | | |
| Potency | Antiviral activity | 3.5 × 10⁸-7.5 × 10⁸ IU/mg |
| (NewLab BioQuality, Germany) | (CPE/A549 lung | (TBC) |
| | cells) | |
| Water content | Karl Fischer method | <10% |
| (Wulfing Pharma, Germany) | | |

[0636] 4. Enteric-Coated Tablet and QC

[0637] Specifications and quality control data for the IFN-α-2b(E41Q) enteric-coated tablets are shown in Table 40 below.

TABLE 40
Enteric-coated tablet specifications and QC

| Analyses | Methods | Specifications |
|---|---|---|
| Appearance* | Visual | White tablets |
| | determination | |
| Identity* | LC-MS (RP-HPLC | Conform to EP pattern |
| (M-Scan, Switzerland) | and Mass | |
| | spectrometry on the | |
| | intact protein) | |
| | Peptide mapping | Conform to EP pattern |
| Strength* | LC-UV | 40, 200 and 450 μg ± 10% |
| (M-Scan, Switzerland) | | |
| Purity* | RP-HPLC | >95% |
| (M-Scan, Switzerland) | | |
| Dimers and HMW* | RP-HPLC | ≦5% |
| (M-Scan, Switzerland) | | |
| Potency* | Antiviral activity | 1.1 × 10⁸-2.9 × 10⁸ IU/mg |
| (NewLab BioQuality, Germany) | (CPE/A549 lung | |
| | cells) | |
| Dissolution | USP 29 <711> | >2 h in gastric condition |
| (CBA, Germany)* | | <45 min in neutral |
| | | condition |
| Microbiological examination | EP/USP (USP 29 | |
| (Wulfing Pharma, Germany)* | <61> methods) | |
| | Total aerobic | <10³ CFU/mg |
| | microbial count | |
| | Total combined | <10² CFU/mg |
| | yeasts/molds count | |
| | Absence E. coli | Absence E. coli |
| Content uniformity* | USP 29 < 905> by LC- | |
| (M-Scan, Switzerland) | UV quantification | |
| | (M-Scan) | |
| Water content | Karl Fischer method | <10% |
| (Wulfing Pharma, Germany)** | | |
| Disintegration | EP 5.6 (2.9.1) | Gastric fluid > 2 h |
| (Wulfing Pharma, Germany)** | | Intestinal fluid < 30 min |
| Average mass | Weight measured | 165 mg ± 5% |
| (Wulfing Pharma, Germany)** | | |
| Thickness | Calliper system | 3 mm ± 10% |
| (Wulfing Pharma, Germany)** | | |

*Release tests
**For characterization

[0638] 5. Enteric-Coated Capsule Specifications and QC

[0639] Specifications and quality control data for the IFN-α-2b(E41Q) enteric-coated capsule prototype (from the pre-clinical batch) are shown in Table 41 below.

TABLE 41
Enteric-coated capsule specifications and QC

| Analyses | Tests | Specifications |
|---|---|---|
| Appearance of enteric- | Visual determination | White capsule |
| coated capsules | | |
| Content uniformity | OD_{280 nm} | Desired concentration of |
| | | IFN-α-2b(E41Q) in |
| | | formulated |
| | | powder*/enteric-coated |
| | | capsule |
| Mass determination | Weight measurement | 28.00 mg**/enteric- |
| | | coated capsule or 27.30 |
| | | mg***/enteric-coated |
| | | capsule |

*The enteric-coated capsule formulation was prepared with 0.20 mg, 0.40 mg, 0.60 mg and 0.80 mg of IFN-α-2b(E41Q) per capsule. The protein content was determined by OD_{280 nm} after dilution with PBS
**Torpac capsule = 28.00 mg correspond to 19.00 mg formulated powder + 9.00 mg capsule weight
***Capsugel capsule = 27.30 mg correspond to 21.50 mg formulated powder + 5.80 mg capsule weight

### Example 8

### IFN-α-2b(E41Q) Screening with HCV Replicon System

[0640] The anti-viral activity of the IFN-α-2b(E41Q) preparations was assessed using the hepatitis C virus (HCV) replicon system. This is an in vitro cell culture system in which HCV is propagated following transfection of the cells with an HCV replicon (see e.g. Lohmann et al. (1999) Science 285:26-30). HCV virus does not infect cells in culture, so self-amplifying replicons are used to produce HCV proteins and RNAs in the cells. The HCV replicons are RNA constructs that typically contain the genes encoding the non-structural proteins, an IRES (internal ribosome entry site) to facilitate translation, and a selectable marker. Transfection of these replicons into suitable mammalian cells, such as Huh7 and Huh7.5.1 cells, results in autonomous production of HCV RNA and protein. The system can therefore be used to evaluate the antiviral properties various drugs and molecules, including IFN-α-2b(E41Q).

[0641] The antiviral activities of IFN-α-2b(E41Q) laboratory-scale batch No. IFN-003-05 and clinical batch No. G055/060118 were evaluated using the HCV replicon system, and compared to the activities native IFN-α (IFN 002-06) and an IFN-α-2b internal control (LAB21, Cambridge CB4 0GA, United Kingdom). Cells were transfected with HCV sub-type 1a and 1b replicons, and were then treated with the IFN-α-2b(E41Q), IFN-α-2b and IFN-α samples at 1, 5, 20, 100 and 500 IU/mL for 3 days. The level of HCV sub-type 1a and 1b replicon replication was determined by reverse transcription real-time PCR, which measured the amount of viral RNA produced in the cells. GAPDH mRNA also was quantified as used as endogenous control to normalize results for differences in the amount of total RNA added to each reaction. The EC50 (50% effective dose) were calculated by regression using the line generated from the mean data value at each concentration. The CC50 (50% cytotoxic concentration) is the concentration of IFN required reduce cell viability by 50%. The Selectivity Index (SI) was determined by measuring the CC50/EC50 ratio.

[0642] A dose-dependent inhibition of HCV replicon replication was observed when the IFN-α-2b(E41Q), IFN-α-2b or IFN-α samples were added to the cell culture (Table 42). Similar results were obtained in the both the HCV 1a and 1b sub-type replicon systems. Both batches of IFN-α-2b(E41Q) showed anti-viral activity comparable to the activity shown by standard IFN-α control samples.

TABLE 42
Inhibition of HCV replicon replication

| | | | GAPDH | | | |
|---|---|---|---|---|---|---|
| | HCV | HCV | CC50 | | | Anti- |
| | 1a | 1b | (1a and | SI | SI | viral |
| Sample | EC₅₀ | EC₅₀ | 1b)* | 1a** | 1b** | effect |
| Native | 3.9 | 5.5 | >500.0 | >128.2 | >90.0 | Active |
| IFN-α | | | | | | |
| IFN 002-06 | IU/mL | IU/mL | IU/mL | | | |
| IFN-α- | 2.5 | 6.0 | >500.0 | >200.0 | >83.3 | Active |
| 2b(E41Q) | IU/mL | IU/mL | IU/mL | | | |
| G055/ | | | | | | |
| 060118 | | | | | | |
| IFN-α- | 0.8 | 1.5 | >500.0 | >625.0 | >333.3 | Active |
| 2b(E41Q) | IU/mL | IU/mL | IU/mL | | | |
| IFN-003-05 | | | | | | |
| LAB21 | 1.0 | 2.7 | >500.0 | >500.0 | >185.2 | Active |
| IFN-α- | IU/mL | IU/mL | IU/mL | | | |
| 2b internal | | | | | | |
| control | | | | | | |

### Example 9

### In Vivo Pharmacokinetic (PK) Studies of IFN-α-2b(E41Q) in Normal Rats Compared to Native IFN-α Following Various Routes of Administration

[0643] Pharmacokinetic studies were performed on 8-week old Sprague-Dawley male rats (301-325 g) to compare various routes of administration, including intraduodenal (ID) subcutaneous (SC), per os (PO, liquid gavage and enteric-coated capsules), and intravenous (IV) administrations. The following dosages were tested for each administration as follows: IV (10 μg per rat of IFN-α-2b(E41Q) or native IFN-α), ID (2 mg per rat of IFN-α-2b(E41Q) or native IFN-α), SC (50 μg per rat of IFN-α-2b(E41Q) or native IFN-α), PO (2 mg per rat of IFN-α-2b(E41Q) or native IFN-α, 1, 0.75, 0.5 and 0.25 mg per rat of IFN-α-2b(E41Q) for the enteric-coated capsule formulation; 2 mg per rat of IFN-α-2b(E41Q) or native IFN-α and 3.4, 1.9, 1 and 0.5 mg per rat of IFN-α-2b(E41Q) for the gavage liquid formulation).

[0644] 1. General Procedures

[0645] At various time points following each administration, a blood sample (200 μl) was taken from all rats via a jugular vein catheter (inserted 18-24 hours before protein administration) for determination of remaining antiviral activity levels of IFN-α-2b(E41Q) or native IFN-α in plasma. The blood samples were placed in ice-cold collection tubes containing lithium-heparin and gently mixed followed by immediate addition of anti-protease solution (30 μl). Tubes were kept on ice (within 30 minutes of collection) and centrifuged at 2000 g for 10 minutes at 4° C. Plasma was harvested in 3 tubes of at least 40 μl each and kept frozen at −20° C. or −80° C. until use. The antiviral activity assay was performed using 20 μl plasma for IV route, 10 μl plasma for SC route or 30 μl plasma for ID and PO route diluted in 1 ml of culture medium followed by 2-fold serial dilutions. After a 16 h treatment of HeLa cells with diluted plasma samples, cells were infected with the EMC virus. At 48 h post-infection, the number of living cells was determined by viable cell staining (methylene blue) and OD measurement at a wavelength of 660 nm.

[0646] EC₅₀ and specific activity (IU/ml of animal plasma) were calculated for each kinetic point using NEMO in-house software with the following equation: [((A/B)×C)×(10001V)]/[D/B], with A being the remaining specific activity detected in plasma of the injected protein, B the specific activity of the IFN-α-2a NIBSC standard control (NIBSC code 95/650) determined in the assay, C the NIBSC quantity (in IU) present in the volume added to cells during the assay, D the specific activity of the injected protein and V the plasma volume tested. The antiviral activity of IFN-α-2b(E41Q) or native IFN-α samples (expressed as number of IU/mg of protein) was determined as the concentration needed for 50% protection of the cells against the EMC virus-induced cytopathic effect. Using PK solution software (SummitPK), PK parameters including Tₘₐₓ, Cₘₐₓ, half-life, and AUC (area under the curve) were determined for each pharmacokinetic profile. AUC refers the commonly used PK parameter which measures the area under the curve in a plot of concentration of drug in plasma against time.

[0647] 2. Drug Batches

[0648] For the pharmacokinetic studies presented in this Example, three different IFN-α-2b(E41Q) batches were used: IFN-005/05, IFN-007/05 and IFN-001/06 (described in Examples 3 and 4). To compare the pharmacokinetic activity of IFN-α-2b(E41Q) to unmodified IFN-α-2b, three different native IFN-α-2b batches also were used: IFN-006/05, IFN-004/05 and IFN-002/06 (described in Example 3). Specifications and routes of administration for each batch are presented in Tables 43(a-g) below.

TABLE 43a
IFN-α-2b(E41Q) Batch # IFN-005/05

| | |
|---|---|
| Correspondence | 227 MIU = 1 mg |
| MIU vs. mg | |
| Presentation | Vials containing 22.7 MIU of IFN-α-2b(E41Q) |
| | solubilized in 24% Tris buffer pH 8.5 (50 mM) and |
| | 76% PBS solution containing 0.1% BSA at a |
| | nominal concentration of 22.7 MIU/ml (100 μg/ml) |
| Number of vials | 1 (IV) and 4 vials (SC) |
| Volume per vial | 1 ml |
| Administrations | Intravenous and subcutaneous |

TABLE 43b
IFN-α-2b(E41Q) Batch # IFN-007/05

| | |
|---|---|
| Correspondence | 250 MIU = 1 mg |
| MIU vs. mg | |
| Presentation | Vials containing 500 MIU of IFN-α-2b (E41Q) |
| | solubilized in 60% Tris buffer pH 8.5 (50 mM) and |
| | 40% PBS solution containing 0.1% BSA at a |
| | nominal concentration of 500 MIU/ml (2 mg/ml) |
| Number of vials | 7 vials |
| Volume per vial | 1 ml |
| Administration | Intraduodenal |

TABLE 43c
IFN-α-2b(E41Q) Batch # IFN-001/06

| | |
|---|---|
| Correspondence | 335 MIU = 1 mg |
| MIU vs. mg | |
| Presentation | Vials containing 1139, 670, 636.5, 335 and 167.5 |
| | MIU of IFN-α-2b(E41Q) re-solubilized in PBS |
| | buffer containing NaCl (7.5 g/l), sodium phosphate |
| | dibasic (1.8 g/l), sodium phosphate mono basic |
| | (1.3 g/l) EDTA disodium (0.1 g/l) and sucrose (14.7 |
| | g/l) pH 6.8-7 at a nominal concentration of 1139 |
| | MIU/ml (3.4 mg), 670 MIU/ml (2 mg/ml); 636.5 |
| | MIU/ml (1.9 mg/ml); 335 MIU/ml (1 mg/ml) and |
| | 167.5 MIU/ml (0.5 mg/ml) |
| Number of vials | 7 vials for each dose |
| Volume per vial | 1 ml |
| Administration | Per-os |

TABLE 43d
IFN-α-2b(E41Q) Batch # IFN-001/06

| | |
|---|---|
| Correspondence | 335 MIU = 1 mg |
| MIU vs. mg | |
| Presentation | Capsules containing 1139 MIU (3.4 mg), 670 MIU |
| | (2 mg), 636.5 MIU (1.9 mg), 335 MIU (1 mg) and |
| | 167.5 MIU (0.5 mg) of IFN-α-2b(E41Q) lyophilized |
| | with NaCl (7.5 g/l), sodium phosphate dibasic (1.8 |
| | g/l), sodium phosphate mono basic (1.3 g/l) EDTA |
| | disodium (0.1 g/l) and sucrose (14.7 g/l) pH 6.8-7 |
| Number of vials | 7 vials for each dose |
| Volume per vial | 1 ml |
| Administration | Capsule |

TABLE 43e
Native IFN-α-2b Batch # IFN-004/05

| | |
|---|---|
| Correspondence | 190 MIU = 1 mg |
| MIU vs. mg | |
| Presentation | Vials containing 50 MIU of native IFN-α-2b |
| | solubilized in 27% Tris buffer pH 8.5 (50 mM) and |
| | 73% PBS solution containing 0.1% BSA at a |
| | nominal concentration of 19 MIU/ml (100 μg/ml) |
| Number of vials | 4 vials |
| Volume per vial | 1 ml |
| Administrations | Subcutaneous and intravenous |

TABLE 43f
Native IFN-α-2b Batch # IFN-006/05

| | |
|---|---|
| Correspondence | 200 MIU = 1 mg |
| MIU vs. mg | |
| Presentation | Vials containing 800 MIU of native IFN-α-2b |
| | solubilized in 52% Tris buffer pH 8.5 (50 mM) and |
| | 48% PBS solution containing 0.1% BSA at a |
| | nominal concentration of 400 MIU/ml (2 mg/ml) |
| Number of vials | 7 vials |
| Volume per vial | 2 ml |
| Administrations | Intraduodenal (ID) and single dose per-os (liquid) |

TABLE 43g
Native IFN-α-2b Batch # IFN-002/06

| | |
|---|---|
| Correspondence | 388 MIU = 1 mg |
| MIU vs. mg | |
| Presentation | Vials containing 776 MIU of native IFN-α-2b |
| | protein solubilized in PBS solution containing 0.1% |
| | BSA at a nominal concentration of 776 MIU/ml (2 |
| | mg/ml) |
| Number of vials | 7 vials |
| Volume per vial | 1 ml |
| Administrations | Subcutaneous and intravenous |

[0649] 3. ID Administration

[0650] For the intraduodenal study, a single dose liquid formulation containing 2 mg of IFN-α-2b(E41Q) or native IFN-α-2b was administered per rat by intraduodenal (ID) route to 8-week old Sprague-Dawley male rats. In addition to the vein catheter described in (1), an intraduodenal catheter was inserted into the animal groups involved in the ID study, 18-24 hours before protein administration. Dosage information and experimental design details are presented in Table 44 below.

TABLE 44
Dosage and experimental detail for ID study

| | Number | | | | |
|---|---|---|---|---|---|
| Group | of | | | Administration | Dose and |
| number | animals | Surgery | Treatment | Route | volume |
| 1 | 6 | Intraduodenal | Native | Intraduodenal | 2 mg |
| | | catheterization; | IFN-α-2b | catheter | (1800MIU/kg-6 mg/kg) |
| | | jugular vein | | | 1 mL |
| | | catheterization | | | |
| 2 | 6 | Intraduodenal | IFN-α- | Intraduodenal | 2 mg |
| | | catheterization; | 2b(E41Q) | catheter | (1800MIU/kg-(6 mg/kg) |
| | | jugular vein | | | 1 mL |
| | | catheterization | | | |

[0651] Collection of blood samples (200 μL) was done via a jugular vein catheter at the following time-points: 0, 0.5, 1, 2, 4 and 8 h. The amount of remaining IFN-α-2b(E41Q) in animal plasma was determined by an antiviral activity assay based on the protection from the CPE of EMCV following the infection of HeLa cells, as described in detail above.

[0652] The PK parameters calculated from the average of six animal PK profiles after ID administration to rats (2 mg/rat) are presented in Table 45 below.

TABLE 45
PK parameters for ID administration

| | IFN-α-2b(E41Q) | Native IFN-α |
|---|---|---|
| Cₘₐₓ (IU/mL) | 16390 | 1592 |
| Half-life (h) | 3.2 | 0.9 |
| AUC_{(0-∞)} (IU-h/mL) | 89987 | 2991 |
| AUC₍₀₋ₜ₎ (IU-h/mL) | 81623 | 2486 |
| Tₘₐₓ (h) | 2 | 0.5 |

[0653] Following intraduodenal administration, a large increase in the antiviral activity was detected in IFN-α-2b(E41Q) rat plasma samples compared to native IFN-α-2b plasma samples. As shown in Table 45 above, IFN-α-2b(E41Q) Cₘₐₓ and AUC_{(0-∞)} parameters were respectively about 10.3-fold and 30-fold increased compared to those observed for native IFN-α, due to the increased absorption of IFN-α-2b(E41Q) from the duodenal compartment to the systemic circulation. In addition, an increase of about 3.6-fold in IFN-α-2b(E41Q) half-life in the systemic blood compartment compared to that of native IFN-α was observed, suggesting a sustained delivery of IFN-α-2b(E41Q) from the intestinal compartment to the systemic circulation most likely due to a slow absorption coupled with decreased susceptibility to intestinal protease degradation.

[0654] 4. SC Administration

[0655] For the subcutaneous study, a single dose liquid formulation containing 50 μg of IFN-α-2b(E41Q) or native IFN-α-2b was administered per rat by subcutaneous (SC) route to 8-week old Sprague-Dawley male rats. Dosage information and experimental design details are presented in Table 46 below.

TABLE 46
Dosage and experimental detail for SC study

| | Number | | | | |
|---|---|---|---|---|---|
| Group | of | | | Administration | Dose and |
| number | animals | Surgery | Treatment | Route | volume |
| 3 | 6 | Jugular vein | Native IFN-α- | SC | 50 μg |
| | | catheterization | 2b | | (45MIU/kg-150 μg/kg) |
| | | | | | 0.5 mL |
| 4 | 6 | Jugular vein | IFN-α- | SC | 50 μg |
| | | catheterization | 2b(E41Q) | | (45MIU/kg-150 μg/kg) |
| | | | | | 0.5 mL |

[0656] Collection of blood samples (200 μL) was done via a jugular vein catheter at the following time-points: 0, 0.5, 1, 2, 4 and 8 h. PK parameters including Cₘₐₓ, Tₘₐₓ, half-life and AUC were determined for each PK profile and presented in Table 47 below.

TABLE 47
PK parameters for SC administration

| | IFN-α-2b(E41Q) | Native IFN-α |
|---|---|---|
| Cₘₐₓ (IU/ml) | 20431 | 17671 |
| Half-life (hr) | n/d | 0.9 |
| AUC_{(0-∞) expo} (IU-hr/ml) | n/d | 27834 |
| AUC₍₀₋ₜ₎ (IU-hr/ml) | 116475 | 26723 |
| Tₘₐₓ (hr) | 0.5 | 0.5 |

n/d corresponds to non determinable PK parameters due to no antiviral activity loss monitored at 24 h in rat plasma - pharmacokinetic curves show a “plateau” at 24 h

[0657] Administration of native IFN-α and IFN-α-2b(E41Q) protein by subcutaneous route led to a fast absorption of protein from the presystemic tissue compartment to the systemic blood circulation with a maximal concentration at 0.5 hours post-injection about 17671 IU/mL and 20431 IU/mL, respectively. Native IFN-α-2b also was rapidly eliminated from blood with a half-life about 0.9 h whereas PK profiles obtained for IFN-α-2b(E41Q) showed a plateau at 8 h post-injection. The increase in half-life observed for IFN-α-2b(E41Q) compared to native IFN-α was correlated with an increase in AUC₍₀₋ₜ₎ parameter about 4.3-fold.

[0658] 5. PO Administration of Liquid Formulation

[0659] To determine the oral bioavailability of liquid formulations of IFN-α-2b(E41Q) after per os (PO) administration (i.e. PO liquid gavage), a single dose PO administration study was performed followed by a multi-dose study.

[0660] a. Single Dose PO Administration

[0661] For the initial PO administration study, a single dose liquid formulation containing 2 mg of IFN-α-2b(E41Q) or native IFN-α-2b was administered per rat by (PO) route to 8-week old Sprague-Dawley male rats. Dosage information and experimental design details are presented in Table 48 below.

TABLE 48
Dosage and experimental detail for PO (liquid, single dose) study

| | Number | | | | |
|---|---|---|---|---|---|
| Group | of | | | Administration | Dose and |
| number | animals | Surgery | Treatment | Route | volume |
| 1 | 6 | Jugular vein | Native IFN- | PO | 2 mg |
| | | catheterization | α-2b | Gavage (liquid) | (1800MIU/kg-6 mg/kg) |
| | | | | | 1 mL |
| 2 | 6 | Jugular vein | IFN-α- | PO | 2 mg |
| | | catheterization | 2b(E41Q) | Gavage (liquid) | (1800MIU/kg-6 mg/kg) |
| | | | | | 1 mL |

[0662] Collection of blood samples (200 μL) was done via a jugular vein catheter at the following time-points: 0, 0.5, 1, 2, 4 and 8 h. PK parameters including Cₘₐₓ, Tₘₐₓ, half-life and AUC were determined for each PK profile and presented in Table 49 below.

TABLE 49
PK parameters for PO (liquid, single dose) administration

| | IFN-α-2b(E41Q) | Native IFN-α-2b |
|---|---|---|
| Cₘₐₓ (IU/ml) | 21326 | — |
| Half-life (hr) | 3.7 | — |
| AUC_{(0-∞)} (IU-hr/ml) | 128174 | — |
| AUC₍₀₋ₜ₎ (IU-hr/ml) | 99909 | — |
| Tₘₐₓ (hr) | 0.5 | — |

[0663] A significant antiviral activity was detected in rat plasma following PO administration of IFN-α-2b(E41Q) liquid formulation with Cₘₐₓ values about 21326 IU/ml and AUC_{(0-∞) expo} parameter value about 128174 IU-hr/ml at a dose of 2 mg/rat. However, no antiviral activity detection was observed in the plasma of rats administered with the liquid formulation of native IFN-α-2b at the same dose. IFN-α-2b(E41Q) half-life was about 3.7 h in systemic blood circulation which was similar to the data obtained from intraduodenal injection.

[0664] b. Multi-Dose PO Administration

[0665] Following the initial single dose PO administration study, a decreasing multi-dose PK study was performed to determine the oral bioavailability of liquid formulations of IFN-α-2b(E41Q) after PO administration. A liquid formulation containing native IFN-α at a dose of 2 mg/rat or IFN-α-2b(E41Q) at doses of 3.4, 2, 1.9, 1 or 0.5 mg/rat were administered PO to rats. Dosage information and experimental design details are presented in Table 50 below.

TABLE 50
Dosage and experimental detail for PO (liquid, multi-dose) study

| | Number | | | | |
|---|---|---|---|---|---|
| Group | of | | | Administration | Dose and |
| number | animals | Surgery | Treatment | Route | volume |
| 1 | 5 | Jugular vein | Native IFN- | PO | 2 mg |
| | | catheterization | α-2b | Gavage (liquid) | (1800MIU/kg-6 mg/kg) |
| | | | | | 1 mL |
| 2 | 5 | Jugular vein | IFN-α- | PO | 3.4 mg |
| | | catheterization | 2b(E41Q) | Gavage (liquid) | (3000MIU/kg-10.2 mg/kg) |
| | | | | | 1 mL |
| 3 | 5 | Jugular vein | IFN-α- | PO | 2 mg |
| | | catheterization | 2b(E41Q) | Gavage (liquid) | (1800MIU/kg-6 mg/kg) |
| | | | | | 1 mL |
| 4 | 5 | Jugular vein | IFN-α- | PO | 1.9 mg |
| | | catheterization | 2b(E41Q) | Gavage (liquid) | (1710MIU/kg-5.7 mg/kg) |
| | | | | | 1 mL |
| 5 | 5 | Jugular vein | IFN-α- | PO | 1 mg |
| | | catheterization | 2b(E41Q) | Gavage (liquid) | (900MIU/kg-3 mg/kg) |
| | | | | | 1 mL |
| 6 | 5 | Jugular vein | IFN-α- | PO | 0.5 mg |
| | | catheterization | 2b(E41Q) | Gavage (liquid) | (450MIU/kg-1.5 mg/kg |
| | | | | | 1 ml |

[0666] Collection of blood samples (200 μL) was done via a jugular vein catheter at the following time-points: 0, 0.5, 1, 2, 4 and 6 h. PK parameters including Cₘₐₓ, Tₘₐₓ, half-life and AUC were determined for each PK profile and presented in Table 51 below.

TABLE 51
PK parameters for PO (liquid, multi-dose) administration

| | | | | | | Native |
|---|---|---|---|---|---|---|
| | IFN-α-2b(E41Q) | | | | | IFN-α |
| Dose (mg) | 3.4 | 2 | 1.9 | 1 | 0.5 | 2 |
| Cₘₐₓ (IU/mL) | 49074 | 29938 | 33211 | 11676 | 15531 | — |
| Half-life (h) | 4.3 | 3.6 | 3.4 | 2.8 | 2.1 | — |
| AUC_{(0-∞)} (IU-h/mL) | 220140 | 137531 | 154234 | 38212 | 31666 | — |
| AUC₍₀₋ₜ₎ (IU-h/mL) | 142022 | 89227 | 115048 | 38212 | 31666 | — |
| Tₘₐₓ (h) | 1 | 0.5 | 0.5 | 0.5 | 0.5 | — |

[0667] As shown in Table 51 above, a significant and dose-dependent antiviral activity was detected in rat plasma following PO administration of IFN-α-2b(E41Q) liquid formulation with Cₘₐₓ values about 49074, 29938, 33211, 11676 and 15531 IU/ml at doses of 3.4, 2, 1.9, 1 and 0.5 mg/rat, respectively. However, no antiviral activity detection was observed in plasma of rats administered with liquid formulation of native IFN-α at a dose of 2 mg/rat. These observations also were correlated with a dose-dependent increase of AUC_{(0-∞)expo} parameter with values about 31666, 38212, 154234, 137531 and 220140 IU-hr/mL obtained for doses of 0.5, 1, 1.9, 2 and 3.4 mg of IFN-α-2b(E41Q) liquid formulation, respectively. These data were in accordance with the data obtained from PO administration of liquid formulation of both IFN-α-2b(E41Q) and native IFN-α at a single dose (2 mg/rat) (described above).

[0668] In addition, a dose-related half-life was obtained for IFN-α-2b(E41Q) in the systemic blood compartment with values about 4.3, 3.6, 3.4, 2.8 and 2.1 h at doses of 3.4, 2, 1.9, 1 and 0.5 mg/rat, respectively, supporting the existence of a sustained delivery of IFN-α-2b(E41Q) from the intestinal compartment to the systemic circulation due to a slow absorption coupled with a resistance to intestinal protease degradation.

[0669] 6. PO Administration of Enteric-Coated Capsule

[0670] A decreasing multi-dose PK study was performed to determine the oral bioavailability of enteric-coated capsule formulations of IFN-α-2b(E41Q) after per os (PO) administration. An enteric-coated capsule formulation containing native IFN-α at a dose of 2 mg/rat or IFN-α-2b(E41Q) at doses of 2, 1, 0.75, 0.5, 0.25 mg/rat were administered PO to rats using a gavage tube. Dosage information and experimental design details are presented in Table 52 below.

TABLE 52
Dosage and experimental detail for PO (enteric-coated capsule) study

| | Number | | | | |
|---|---|---|---|---|---|
| Group | of | | | Administration | Dose and |
| number | animals | Surgery | Treatment | Route | volume |
| 7 | 5 | Jugular vein | Native IFN- | PO | 2 mg |
| | | catheterization | α-2b | Enteric-coated | (1800MIU/kg-6 mg/kg) |
| | | | | Capsule | 1 mL |
| 8 | 5 | Jugular vein | IFN-α- | PO | 2 mg |
| | | catheterization | 2b(E41Q) | Enteric-coated | (1800MIU/kg-6 mg/kg) |
| | | | | Capsule | 1 mL |
| 9 | 5 | Jugular vein | IFN-α- | PO | 1 mg |
| | | catheterization | 2b(E41Q) | Enteric-coated | (900MIU/kg-3 mg/kg) |
| | | | | Capsule | 1 mL |
| 10 | 5 | Jugular vein | IFN-α- | PO | 0.75 mg |
| | | catheterization | 2b(E41Q) | Enteric-coated | (675MIU/kg-2.25 mg/kg) |
| | | | | Capsule | 1 mL |
| 11 | 5 | Jugular vein | IFN-α- | PO | 0.5 mg |
| | | catheterization | 2b(E41Q) | Enteric-coated | (450MIU/kg-1.5 mg/kg) |
| | | | | Capsule | 1 mL |
| 12 | 5 | Jugular vein | IFN-α- | PO | 0.25 mg |
| | | catheterization | 2b(E41Q) | Enteric-coated | (225MIU/kg-0.75 mg/kg) |
| | | | | Capsule | 1 mL |

[0671] Collection of blood samples (200 μL) was done via a jugular vein catheter at the following time-points: 0, 1, 1.5, 2, 4 and 6 h. PK parameters including Cₘₐₓ, Tₘₐₓ, half-life and AUC were determined for each PK profile and presented in Table 53 below.

TABLE 53
PK parameters for PO (enteric-coated capsule) administration

| | | | | | | Native |
|---|---|---|---|---|---|---|
| | IFN-α-2b(E41Q) | | | | | IFN-α |
| Dose (mg) | 2 | 1 | 0.75 | 0.5 | 0.25 | 2 |
| Cₘₐₓ (IU/mL) | 40202 | 34690 | 27491 | 25977 | 18034 | — |
| Half-life (h) | 4.7 | 3 | 4.3 | 1.24 | 0.63 | — |
| AUC_{(0-∞)} (IU-h/mL) | 303209 | 181015 | 190419 | 86139 | 39537 | — |
| AUC₍₀₋ₜ₎ (IU-h/mL) | 165892 | 151368 | 103686 | 61335 | 23795 | — |
| Tₘₐₓ (h) | 1 | 1.5 | 1 | 1 | 1 | — |

[0672] Similar to the liquid formulation, a significant and dose-dependent antiviral activity was detected in rat plasma following PO administration of the IFN-α-2b(E41Q) enteric-coated capsule formulation with Cₘₐₓ values about 40202, 34690, 27491, 25977, and 18034 IU/mL at doses of 2, 1, 0.75, 0.5 and 0.25 mg/rat, respectively. However, no antiviral activity detection was observed in plasma of rats administered with capsule formulation of native the IFN-α at a dose of 2 mg/rat. These observations also correlated with a dose-dependent increase of the AUC_{(0-∞) expo} parameter with values about 39537, 86139, 190419, 181015 and 303209 IU-hr/mL obtained for doses of 0.25, 0.5, 0.75, 1 and 2 mg/rat of the IFN-α-2b(E41Q) capsule formulation, respectively. These data were in accordance with previous data obtained following PO administration of IFN-α-2b(E41Q) liquid formulation showing an increase in absorption of IFN-α-2b(E41Q) from the intestinal compartment to the systemic circulation.

[0673] In addition, a dose-related half-life was obtained for IFN-α-2b(E41Q) in the systemic blood compartment with values about 4.7, 3, 1.24 and 0.63 h at doses of 2, 1, 0.5 and 0.25 mg/rat except for dose 0.75 mg/rat showing a half-life value about 4.3 hours. The dose-related relationship and half-life values observed following PO administration of IFN-α-2b(E41Q) capsule formulation were similar to data obtained with ID administered liquid formulations (compare to Table 45).

[0674] 7. Bioavailability Analysis of PO Administration Versus Intravenous (IV) Administration

[0675] For each dose of IFN-α-2b(E41Q) administered PO (enteric-coated capsule or liquid formulations) to rats, the percentage of IFN-α-2b(E41Q) bioavailability compared to IV administration was determined. PK results for PO administration of liquid formulations or enteric coated capsule formulations are described above in (3) and (4). For IV administrations, rats were injected intravenously at a dosage of 10 μg per rat of IFN-α-2b(E41Q) or native IFN-α. Dosage information and experimental design details for IV administration are presented in Table 54 below.

TABLE 54
Dosage and experimental detail for IV study

| | Number | | | | |
|---|---|---|---|---|---|
| Group | of | | | Administration | Dose and |
| number | animals | Surgery | Treatment | Route | volume |
| 1 | 5 | Jugular vein | Native IFN- | IV | 10 μg |
| | | catheterization | α-2b | | (9MIU/kg-30 μg/kg) |
| | | | | | 100 μl |
| 2 | 3 | Jugular vein | IFN-α- | IV | 10 μg |
| | | catheterization | 2b(E41Q) | | (9MIU/kg-30 μg/kg) |
| | | | | | 100 μl |

[0676] Collection of blood samples (200 μL) was done via a jugular vein catheter at the following time-points: 0, 0.08, 0.50, 1, 2 and 4 h. PK parameters including Cₘₐₓ and AUC were determined for each PK profile and compared to the PO administrations of IFN-α-2b(E41Q) or native IFN-α.

[0677] The percentage of IFN-α-2b(E41Q) bioavailability (BAV) following PO administration compared to IV administration was calculated relative to Cₘₐₓ and AUC using the following equations:

BAV(%) related to Cₘₐₓ=((Cₘₐₓ/dose)_{IFN-α-2b(E41Q)}/(Cₘₐₓ/dose)_{IFN-α-2b(E41Q)-IV)}×100

BAV(%) related to AUC=((AUC/dose)_{IFN-α-2b(E41Q)}/(AUC/dose)_{IFN-α-2b(E41Q)-IV)}×100

BAV(%) related to AUC and to native IFN-α=((AUC/dose)_{IFN-α-2b(E41Q)}/(AUC/dose)_{native-IV)}×100

[0678] Bioavailability analysis (in %) performed on IFN-α-2b(E41Q) enteric-coated capsule formulation after PO administration to rats is presented in Table 55 below.

TABLE 55

| | Per-os administration (capsule formulation) | | | | | | IV administration | |
|---|---|---|---|---|---|---|---|---|
| | IFN-α-2b(E41Q) | | | | | native IFNα | IFN-α-2b(E41Q) | Native IFNα |
| Dose (mg) | 2 | 1 | 0.75 | 0.5 | 0.25 | 2 | 0.01 | 0.01 |
| AUC_{(0-∞) expo} (UI-hr/ml) | 303209 | 181015 | 190419 | 86139 | 39537 | — | 119465 | 45220 |
| Cₘₐₓ (UI/ml) | 40202 | 34690 | 27491 | 25977 | 18034 | — | 66372 | 93956 |
| | | | | | | — | | |
| Cmax/dose | 20101 | 34690 | 36655 | 51954 | 72136 | — | 6637200 | 9395600 |
| BA | | | | | | | | |
| ((Cmax/dose)_{Bel}/(Cmax/dose)_{Bel-IV}) × 100 | 0.3 | 0.5 | 0.6 | 0.8 | 1.1 | — | | |
| | | | | | | — | | |
| AUC/dose | 151605 | 181015 | 253892 | 172278 | 158148 | — | 11946500 | 4522000 |
| BA | | | | | | | | |
| (AUC/dose)_{Bel}/(AUC/dose)_{Bel-IV}) × 100 | 1.3 | 1.5 | 2.1 | 1.4 | 1.3 | — | | |
| BA relative | | | | | | | | |
| (AUC/dose)_{Bel}/(AUC/dose)_{natif-IV}) × 100 | 3.4 | 4.0 | 5.6 | 3.8 | 3.5 | — | | |

[0679] Bioavailability analysis (in %) performed on IFN-α-2b(E41Q) liquid formulation after PO administration to rats is presented in Table 56 below.

TABLE 56

| | Per-os administration (liquid formulation) | | | | | | IV administration | |
|---|---|---|---|---|---|---|---|---|
| | | | | | | native | | Native |
| | IFN-α-2b(E41Q) | | | | | IFNα | IFN-α-2b(E41Q) | IFNα |
| Dose (mg) | 3.4 | 2 | 1.9 | 1 | 0.5 | 2 | 0.01 | 0.01 |
| AUC_{(0-∞) expo} (UI-hr/ml) | 220140 | 137531 | 154234 | 38212 | 31666 | — | 119465 | 45220 |
| Cₘₐₓ (UI/ml) | 49074 | 29938 | 33211 | 11676 | 15531 | — | 66372 | 93956 |
| | | | | | | — | | |
| Cmax/dose | 14434 | 14969 | 17479 | 11676 | 31062 | — | 6637200 | 9395600 |
| BA | | | | | | | | |
| ((Cmax/dose)_{Bel}/(Cmax/dose)_{Bel-IV}) × | 0.2 | 0.2 | 0.3 | 0.2 | 0.5 | — | | |
| 100 | | | | | | — | | |
| AUC/dose | 64747 | 68766 | 81176 | 38212 | 63332 | — | 11946500 | 4522000 |
| BA | | | | | | | | |
| (AUC/dose)_{Bel}/(AUC/dose)_{Bel-IV}) × 100 | 0.5 | 0.6 | 0.7 | 0.3 | 0.5 | — | | |
| BA relative | | | | | | | | |
| (AUC/dose)_{Bel}/(AUC/dose)_{natif-IV}) × 100 | 1.4 | 1.5 | 1.8 | 0.8 | 1.4 | — | | |

[0680] 8. Summary

[0681] For both liquid and enteric-coated capsule formulations, a significant and dose-dependent antiviral activity was detected in rat plasma following PO administration of IFN-α-2b(E41Q) whereas no signal was observed in plasma of native IFN-α protein administered rats. Similar results were obtained with ID administration of IFN-α-2b(E41Q) liquid formulation showing a large increase in Cₘₐₓ and AUC_{(0-∞) expo} parameters about 10.3-fold and 30-fold, respectively, for IFN-α-2b(E41Q) compared to native IFN-α. In addition, a dose-dependent increase in half-life was observed for IFN-α-2b(E41Q) following PO administration (with both capsule and liquid formulations) compared to IV route. Similarly, an increased half-life was observed for IFN-α-2b(E41Q) following ID versus IV administration compared to native protein which strongly supports the existence of a sustained delivery of IFN-α-2b(E41Q) from the intestinal compartment to the systemic circulation most likely related to a slow absorption coupled with resistance to intestinal protease degradation.

[0682] All these data demonstrate the capability of IFN-α-2b(E41Q) to be delivered into the systemic circulation following oral administration compared to native IFN-α.

### Example 10

### Pharmacokinetics and Immunogenicity of IFN-α-2b(E41Q) Following Oral Administration in Rats

[0683] As part of the toxicity study described in Example 16 below, pharmacokinetic profiles were determined for oral administrations of IFN-α-2b(E41Q). The purpose of this study was to assess the pharmacokinetics, immunogenicity and influence of anti-IFN-α-2b(E41Q) antibodies on the PK profile of IFN-α-2b(E41Q) when administered daily by PO route to rats via enteric-coated capsules for 2 weeks. Daily oral administrations of enteric-coated capsule formulations of IFN-α-2b(E41Q) with doses of 0.2, 0.4 and 0.6 mg per animal were performed in rats (specific pathogen free Sprague-Dawley rats) over 14 days. The Sprague-Dawley rat was chosen because of its utility as a predictor of toxic effects of drugs in humans and its recognition by regulatory authorities as a suitable species for toxicity studies. For each dose, six males (250-350 g) and six females (150-250 g, nulliparous and non-gravid) were orally administered 0.2, 0.4 or 0.6 mg doses of IFN-α-2b(E41Q) every day. The control group (6 males and 6 females) received the Placebo (enteric-coated capsules with the same formulation as IFN-α-2b(E41Q) enteric-coated capsules without IFN-α-2b(E41Q)).

[0684] 1. General Procedures

[0685] On administration days 1, 7 and 14 and for each dose immediately before administration and at 1, 2, 4, 8 and 24 h after administration, blood samples were drawn from the retro-orbital sinus of 3 males and 3 females, sampled per time-point and per group, as illustrated in Table 57. A full pharmacokinetic profile of one IFN-α-2b(E41Q) dose was collected using 12 rats (6 males and 6 females), sampled as follows: one group of 3 males and 3 females drawn at pre-dose, 2 and 8 h and another group of 3 males and 3 females at 1, 4 and 24 h.

TABLE 57

| | | Time | | | | | |
|---|---|---|---|---|---|---|---|
| | Rat ID | Predose | 1 H | 2 H | 4 H | 8 H | 24 H |
| IFN-α- | M - 200611872 | X | | X | | X | |
| 2b(E41Q) | M - 200611807 | X | | X | | X | |
| 0.2 mg/rat | M - 200611808 | X | | X | | X | |
| | M - 200611809 | | X | | X | | X |
| | M - 200611810 | | X | | X | | X |
| | M - 200611811 | | X | | X | | X |
| | F - 200611854 | X | | X | | X | |
| | F - 200611855 | X | | X | | X | |
| | F - 200611856 | X | | X | | X | |
| | F - 200611857 | | X | | X | | X |
| | F - 200611858 | | X | | X | | X |
| | F - 200611859 | | X | | X | | X |
| IFN-α- | M - 200611812 | X | | X | | X | |
| 2b(E41Q) | M - 200611813 | X | | X | | X | |
| 0.4 mg/rat | M - 200611814 | X | | X | | X | |
| | M - 200611815 | | X | | X | | X |
| | M - 200611816 | | X | | X | | X |
| | M - 200611817 | | X | | X | | X |
| | F - 200611860 | X | | X | | X | |
| | F - 200611861 | X | | X | | X | |
| | F - 200611862 | X | | X | | X | |
| | F - 200611863 | | X | | X | | X |
| | F - 200611864 | | X | | X | | X |
| | F - 200611865 | | X | | X | | X |
| IFN-α- | M - 200611818 | X | | X | | X | |
| 2b(E41Q) | M - 200611819 | X | | X | | X | |
| 0.6 mg/rat | M - 200611820 | X | | X | | X | |
| | M - 200611821 | | X | | X | | X |
| | M - 200611822 | | X | | X | | X |
| | M - 200611823 | | X | | X | | X |
| | F - 200611866 | X | | X | | X | |
| | F - 200611867 | X | | X | | X | |
| | F - 200611868 | X | | X | | X | |
| | F - 200611869 | | X | | X | | X |
| | F - 200611870 | | X | | X | | X |
| | F - 200611871 | | X | | X | | X |

[0686] Blood samples from the retro-orbital bleeds were stored at room temperature for a few hours. Serum was prepared by centrifugation for 15 minutes at 3000 rpm (1620 g), at 4° C.±2° C. Serum was divided into 3 polypropylene tubes (70-80 μl each) and immediately frozen and stored frozen (<−70° C.) until use. The blood samples were taken from all the animals for i) the determination of plasma levels of IFN-α-2b(E41Q) (PK studies, see methods in Example 9) and ii) the measurement of both total and neutralizing anti-IFN-α antibody levels (antibody determination assays) in rat serum. For each tested dose, both total and neutralizing anti-IFN-α-2b(E41Q) antibodies were determined using the human anti-IFN-α antibody ELISA (for measuring total antibodies) according to the manufacturer's instructions (A4-203—MDS Pharma Services, Zürich, Switzerland) and Kawade's assay (for measuring neutralizing antibodies; Kawade et al., J. Interferon Research, 1987, Grossberg et al., J. Interferon Cytokines Research; 2001; Grossberg et al., Biotherapy; 1997; Kawade Y., J. Interferon Research, 1980; 1:61-70; Kawade et al., J. Immunological Methods, 2003).

[0687] 2. Drug Batches

[0688] For the pharmacokinetic and immunogenicity studies presented in this Example, one batch of IFN-α-2b(E41Q) was used: IFN-001-06. As a control, enteric-coated placebo capsules were used. Specifications and routes of administration for the experimental and placebo batches are presented in Tables 58(a and b) below.

TABLE 58a
IFN-α-2b(E41Q) Batch # IFN-001-06

| | |
|---|---|
| Correspondence | 335 MIU = 1 mg |
| MIU vs. mg | |
| Presentation | Enteric-coated capsules (size 9) containing 0.2, 0.4 |
| | and 0.6 mg of IFN-α-2b(E41Q) lyophilized in NaCl |
| | 7.5 mg/mL; sodium phosphate dibasic 1.8 mg/mL; |
| | sodium phosphate monobasic 1.3 mg/ml; EDTA |
| | disodium 0.1 mg/mL and sucrose 14.7 mg/ml pH |
| | 6.8-7. Capsule filling is completed if necessary with |
| | mannitol powder |
| Administrations | Per-os |

TABLE 58b
Enteric-coated placebo capsules

| | |
|---|---|
| Correspondence MIU vs. mg | None |
| Presentation | Enteric-coated capsules (size 9) containing |
| | mannitol powder up to 28-30 mg |
| Administrations | Per-os |

[0689] 3. Neutralizing Anti-IFN-α-2b(E41Q) Antibodies

[0690] Quantitative determination of neutralizing antibodies was performed according to Kawade's assay. Specifically, 10 LU (Laboratory Units) of IFN-α-2b(E41Q) were treated with 2-fold serial dilutions of rat serum samples (ranging from 14- to 28672-fold). After incubation for 1 h at 37° C., mixtures were placed 16 h on HeLa cells and then, cells were infected with EMC-Virus. At 48 h post-infection, the number of living cells was determined by viable cells staining (Methylene blue) and OD measurement.

[0691] Neutralizing antibody levels were determined as 10-fold reducing unit per mL of rat serum (TRU/mL) corresponding to the dilution of rat serum required to neutralize the activity of 10 LU of corresponding IFN-α-2b(E41Q) by calculating the neutralizing EC₅₀ value (nEC₅₀).

[0692] Results representing neutralizing antibody levels measured for each IFN-α-2b(E41Q) enteric-coated capsule dose (0.2, 0.4 and 0.6 mg) at day 15 are shown in Tables 59(a-c), respectively. A neutralizing antibody titer >20 TRU/ml (Ten-fold Reducing Unit) was considered as the threshold for positivity.

TABLE 59a
0.2 mg/rat

| Dose 0.2 mg/rats | TRU/ml |
|---|---|
| F854 | 0.0 |
| F855 | 0.0 |
| F856 | 0.0 |
| F857 | 0.0 |
| F858 | 0.1 |
| F859 | 0.0 |
| M807 | 81.3 |
| M808 | 0.0 |
| M809 | 0.0 |
| M810 | 0.0 |
| M811 | 0.0 |
| M872 | 0.0 |

TABLE 59b
0.4 mg/rat

| Dose 0.4 mg/rats | TRU/ml |
|---|---|
| F860 | 0.0 |
| F861 | 0.0 |
| F862 | 0.0 |
| F863 | 0.0 |
| F864 | 118.1 |
| F865 | 0.0 |
| M812 | 53.1 |
| M813 | 0.0 |
| M814 | 0.0 |
| M815 | 0.0 |
| M816 | 0.0 |
| M817 | 0.0 |

TABLE 59c
0.6 mg/rat

| Dose 0.6 mg/rats | TRU/ml |
|---|---|
| F866 | 0.0 |
| F867 | 0.0 |
| F868 | 0.0 |
| F869 | 0.0 |
| F870 | 0.0 |
| F871 | 0.0 |
| M818 | 0.0 |
| M819 | 0.0 |
| M820 | 0.0 |
| M821 | 0.0 |
| M822 | 0.0 |
| M823 | 0.0 |

[0693] No detectable levels of neutralizing antibodies were measured in rat serum at day 1 for doses of 0.2, 0.4 and 0.6 mg and for placebo in all animals tested.

[0694] As shown in Tables 59(a-c), at day 15, no detectable neutralizing antibody (Nab) levels were measured in 11 rats orally administered with 0.2 mg of IFN-α-2b(E41Q) enteric-coated capsule, only one male (M807) exhibited positive titer of 81.3 TRU/ml (Table 59a). Similarly, with a dose of 0.4 mg/rat (Table 59b), 10 rats exhibited no detectable levels of NAb whereas female F864 and male M812 showed detectable amounts of NAb of 118.1 TRU/ml and 53.1 TRU/ml, respectively. No titer of NAb was detected in all rats administered orally with a dose of 0.6 mg/rat (Table 59c).

[0695] 4. Total Anti-IFN-α-2b(E41Q) Antibodies

[0696] Total anti-IFN-α antibody concentrations contained in rat serum samples were determined using the human anti-IFN-α antibody ELISA. The samples were diluted 9 times according to the manufacturer's protocol (IFN-alpha ELISA Kit Manual) and results were expressed in IU/mL after extrapolation from standard curve of OD value measured with spectrophotometer at 450 nm (SOP-AU-212-IFNα2b at IPM GmbH, Hamburg: determination of total anti-IFN alpha samples by MDS Pharma Services ELISA).

[0697] Results representing total antibodies levels measured for each IFN-α-2b(E41Q) enteric-coated capsule dose (0.2, 0.4 and 0.6 mg) are shown in Tables 60(a-c), respectively. The limit of detection of anti-IFN-α was determined to be 0.24 IU/mL. The calculated overall coefficient of variation in inter assays was 7.4% with a nominal concentration of 0.35 IU/mL and 2.5% with 4.2 IU/mL (determination made by the manufacturer of ELISA kits).

TABLE 60a
0.2 mg/rat

| Dose 0.2 mg/rats | IU/ml |
|---|---|
| F854 | 0.0 |
| F855 | 0.0 |
| F856 | 0.0 |
| F857 | 0.0 |
| F858 | 8.3 |
| F859 | 0.0 |
| M807 | 0.3 |
| M808 | 0.0 |
| M809 | 0.0 |
| M810 | 0.0 |
| M811 | 0.0 |
| M872 | 0.0 |

TABLE 60b
0.4 mg/rat

| Dose 0.4 mg/rats | IU/ml |
|---|---|
| F860 | 0.0 |
| F861 | 0.0 |
| F862 | 0.0 |
| F863 | 0.0 |
| F864 | 78.5 |
| F865 | 0.0 |
| M812 | 0.0 |
| M813 | 0.0 |
| M814 | 0.0 |
| M815 | 0.0 |
| M816 | 0.0 |
| M817 | 0.0 |

TABLE 60c
0.6 mg/rat

| Dose 0.6 mg/rats | IU/ml |
|---|---|
| F866 | 0.0 |
| F867 | 0.0 |
| F868 | 0.0 |
| F869 | 0.0 |
| F870 | 0.0 |
| F871 | 0.0 |
| M818 | 0.0 |
| M819 | 0.0 |
| M820 | 0.0 |
| M821 | 0.0 |
| M822 | 0.0 |
| M823 | 0.0 |

[0698] No detectable concentrations of total antibodies were measured in rat serum at day 1 for doses of 0.2, 0.4 and 0.6 mg and for placebo in all animals tested.

[0699] As shown in Tables 60(a-c), at day 15, no total anti-IFN-α-2b(E41Q) antibodies were detected in 10 rats orally administered with 0.2 mg of IFN-α-2b(E41Q) enteric-coated capsule. Only two animals, female F858 and male M807, exhibited low concentrations of total antibodies about 8.3 and 0.3 IU/ml, respectively (Table 60a). Similarly, with a dose of 0.4 mg/rat (Table 60b), 11 rats exhibited no detectable concentration levels of total antibodies except for female F864 with a detectable amount of total antibodies about 78.5 IU/ml. Of note, animal M812 showing positive NAb titer with a dose of 0.4 mg (53.1 TRU/ml) exhibited no detectable levels of total antibodies. An absence of total antibodies was observed in all rats orally administered with a dose of 0.6 mg/animal (Table 60c).

[0700] 5. Remaining Antiviral Activity in Rat Serum Following Daily PO Administration of IFN-α-2b(E41Q) Enteric-Coated Capsule Formulation

[0701] PK parameters of IFN-α-2b(E41Q) enteric-coated capsule formulation after PO administration to rats at day 1 with doses of 0.2, 0.4 and 0.6 mg per animal are provided in Table 61 below. Means of both 3 male and 3 female rat PK parameters for each dose of IFN-α-2b(E41Q) are shown.

TABLE 61
Day 1

| | Cₘₐₓ | Tₘₐₓ | AUC_{(0-∞)} | AUC₍₀₋ₜ₎ |
|---|---|---|---|---|
| Enteric-coated capsules | (IU/mL) | (h) | (h-IU/mL) | (h-IU/mL) |
| IFN-α-2b(E41Q) - 0.2 mg | 4909 | 1 | 20945 | 20945 |
| IFN-α-2b(E41Q) - 0.4 mg | 53248 | 1 | 576002 | 501338 |
| IFN-α-2b(E41Q) - 0.6 mg | 180173 | 1 | 1731959 | 1730200 |

[0702] PK parameters of IFN-α-2b(E41Q) enteric-coated capsule formulation after PO administration to rats at day 7 with doses of 0.2, 0.4 and 0.6 mg per animal are provided in Table 62 below. Means of both 3 male and 3 female rat PK parameters for each dose of IFN-α-2b(E41Q) are shown.

TABLE 62
Day 7

| | Cₘₐₓ | Tₘₐₓ | AUC_{(0-∞)} | AUC₍₀₋ₜ₎ |
|---|---|---|---|---|
| Enteric-coated capsules | (IU/mL) | (h) | (h-IU/mL) | (h-IU/mL) |
| IFN-α-2b(E41Q) - 0.2 mg | 4379 | 1 | 16386 | 16386 |
| IFN-α-2b(E41Q) - 0.4 mg | 50144 | 1 | 413264 | 413264 |
| IFN-α-2b(E41Q) - 0.6 mg | 195917 | 1 | 1698113 | 1698113 |

[0703] PK parameters of IFN-α-2b(E41Q) enteric-coated capsule formulation after PO administration to rats at day 14 with doses of 0.2, 0.4 and 0.6 mg per animal are provided in Table 63 below. Means of both 3 male and 3 female rat PK parameters for each dose of IFN-α-2b(E41Q) are shown.

TABLE 63
Day 14

| | Cₘₐₓ | Tₘₐₓ | AUC_{(0-∞)} | AUC₍₀₋ₜ₎ |
|---|---|---|---|---|
| Enteric-coated capsules | (IU/mL) | (h) | (h-IU/mL) | (h-IU/mL) |
| IFN-α-2b(E41Q) - 0.2 mg | 4434 | 1 | 19673 | 19673 |
| IFN-α-2b(E41Q) - 0.4 mg | 38829 | 1 | 289805 | 289805 |
| IFN-α-2b(E41Q) - 0.6 mg | 112320 | 1 | 1175233 | 1175233 |

[0704] No impairment of PK profiles was observed at day 1 and day 7 with doses of 0.2, 0.4 and 0.6 mg. At day 14, AUC₍₀₋ₜ₎ and Cₘₐₓ mean values measured from all PK profiles were similar compared to day 1 for each administered IFN-α-2b(E41Q) dose tested except for animals treated with a dose of 0.6 mg presenting reduction in Cₘₐₓ and AUC₍₀₋ₜ₎ values (4909 IU/mL versus 4434 IU/mL for Cₘₐₓ at days 1 and 14 respectively with a dose of 0.2 mg; 180173 IU/mL versus 112320 IU/mL for Cₘₐₓ at day 1 and 14 respectively with a dose of 0.6 mg; 20945 IU-hr/mL versus 19673 IU/mL for AUC₍₀₋ₜ₎ at day 1 and 14 respectively with a dose of 0.2 mg and 1730200 IU-hr/mL versus 1175233 IU/mL for AUC₍₀₋ₜ₎ at days 1 and 14 respectively with a dose of 0.6 mg). However, no neutralizing antibody or total antibody was detected in rats treated with a dose of 0.6 mg at day 15 suggesting that the decrease in PK parameters observed between day 1 and day 14 was not due to the presence of antibodies but more likely due to animal heterogeneity and inter individual variability.

[0705] With a dose of 0.4 mg, a moderate but significant reduction of Cₘₐₓ and AUC₍₀₋ₜ₎ values also was observed between day 1 and day 14 (53248 IU/mL versus 38829 IU/mL for Cₘₐₓ at day 1 and day 14, respectively; 501338 IU-hr/mL versus 289805 IU-hr/mL for AUC₍₀₋ₜ₎ at day 1 and day 14, respectively).

[0706] These findings correlate well with the presence of positive levels of total and neutralizing antibodies in rat serum with a dose of 0.4 mg at day 15 (two out of the twelve animals).

[0707] 6. Summary

[0708] In summary, no neutralizing and total antibody levels were detected with doses of 0.2 and 0.6 mg per animal in rat serum after daily PO administration of IFN-α-2b(E41Q) enteric-coated capsules over 2 weeks. This finding was supported by the absence of strong impairment of the IFN-α-2b(E41Q) pharmacokinetic profile observed at day 14 or at day 7 with doses of 0.2, 0.4 and 0.6 mg per animal after daily administration by oral route of IFN-α-2b(E41Q) enteric-coated capsules over 2 weeks. With a dose of 0.4 mg, only two out of the twelve animals showed positive neutralizing antibody titers (with only one animal presenting significant total antibody levels). A moderate reduction of Cₘₐₓ and AUC₍₀₋ₜ₎ values was observed between day 1 and day 14 with this dose.

### Example 11

### In Vivo Pharmacokinetic Study of IFN-α-2b(E41Q) in Cynomolgus Monkeys (Macaca fascicularis) Following IV and Oral Routes of Administration

[0709] An in vivo pharmacokinetic study was performed in Cynomolgus monkeys to assess the PK profiles of IFN-α-2b(E41Q) following IV and PO routes of administration. This data was then compared to previous PK profiles obtained for subcutaneous administration of native IFN-α and the commercial native IFN-α product Intron A® interferon. The results obtained from intravenous (IV) administration of IFN-α-2b(E41Q) and native IFN-α at a dose of 50 μg/kg were used to calculate the percentage of both IFN-α-2b(E41Q) and native IFN-α bioavailability following PO administration.

[0710] 1. General Procedures

[0711] Pharmacokinetic studies were performed on plasma samples of monkeys administered with IFN-α-2b(E41Q) and native IFN-α. The PK profiles were based on the amount of remaining IFN-α-2b(E41Q) in animal plasma was determined by an antiviral activity assay (as described in Example 9).

[0712] 2. Drug Batches

[0713] For the pharmacokinetic studies presented in this Example, three different IFN-α-2b(E41Q) batches were used: G055/LPC1/060221, IFN-001/06 and G055/060118T (described in Example 4). To compare the pharmacokinetic activity of IFN-α-2b(E41Q) to unmodified IFN-α-2b, a native IFN-α-2b batches also was used: IFN-002/06 (described in Example 3). Specifications and routes of administration for each batch are presented in Table 64(a-e) below.

TABLE 64a
IFN-α-2b(E41Q) Batch # G055/LPC1/060221

| | |
|---|---|
| Correspondence | 181 MIU = 1 mg |
| MIU vs. mg | |
| Presentation | Vials containing 18.1 MIU of IFN-α-2b(E41Q) |
| | solubilized in NaCl 7.5 mg/ml; sodium phosphate |
| | dibasic 1.8 mg/ml; sodium phosphate monobasic |
| | 1.3 mg/ml; EDTA disodium 0.1 mg/ml; Tween-80 |
| | 0.1 mg/ml and m-cresol 1.5 mg/ml at a nominal |
| | concentration of 18.1 MIU/ml (100 μg/ml) |
| Number of vials | 10 vials |
| Volume per vial | 1 ml |
| Administration | Intravenous |

TABLE 64b
Native IFN-α Batch # IFN-002/06

| | |
|---|---|
| Correspondence | 388 MIU = 1 mg |
| MIU vs. mg | |
| Presentation | Vials containing 38.8 MIU of native IFN-α |
| | solubilized in NaCl 7.5 mg/ml; sodium phosphate |
| | dibasic 1.8 mg/ml; sodium phosphate monobasic |
| | 1.3 mg/ml; EDTA disodium 0.1 mg/ml; Tween-80 |
| | 0.1 mg/ml and m-cresol 1.5 mg/ml at a nominal |
| | concentration of 38.8 MIU/ml (100 μg/ml) |
| Number of vials | 5 vials |
| Volume per vial | 1 ml |
| Administration | Intravenous |

TABLE 64c
Native IFN-α Batch # IFN-002/06

| | |
|---|---|
| Correspondence | 388 MIU = 1 mg |
| MIU vs. mg | |
| Presentation | Enteric-coated capsules (size 4) containing 2 × 0.3 mg |
| | of native IFN-α lyophilized in NaCl 7.5 mg/ml; |
| | sodium phosphate dibasic 1.8 mg/ml; sodium |
| | phosphate monobasic 1.3 mg/ml; EDTA disodium |
| | 0.1 mg/ml and sucrose 14.7 mg/ml pH 6.8-7. |
| Number of | 4 enteric-coated capsules (size 4) with inside 2 size |
| capsules | 9 enteric-coated capsules |
| Administration | Per-os |

TABLE 64d
IFN-α-2b(E41Q) Batch # IFN-001/06

| | |
|---|---|
| Correspondence | 335 MIU = 1 mg |
| MIU vs. mg | |
| Presentation | Enteric-coated capsules (size 4) containing 2 × |
| | 0.3 mg of IFN-α-2b(E41Q) lyophilized in NaCl |
| | 7.5 mg/ml; sodium phosphate dibasic 1.8 mg/ml; |
| | sodium phosphate monobasic 1.3 mg/ml; EDTA |
| | disodium 0.1 mg/ml and sucrose 14.7 mg/ml pH 6.8-7. |
| Number of | 4 enteric-coated capsules (size 4) with inside 2 size |
| capsules | 9 enteric-coated capsules |
| Administrations | Per-os |

TABLE 64e
IFN-α-2b(E41Q) Batch # G055/060118T

| | |
|---|---|
| Correspondence | 335 MIU = 1 mg |
| MIU vs. mg | |
| Presentation | Enteric-coated tablets containing 0.603 mg of |
| | lyophilized IFN-α-2b(E41Q) and lactose |
| | monohydrate 64.1 mg; microcrystalline cellulose 27 |
| | mg; polyvidone kollidon 25 1.8 mg; crospovidone |
| | polyplasdone XL 3.6 mg; magnesium stearate 1.8 |
| | mg. Enteric-coated tablets are coated with gastric- |
| | resistant coating Eudragit S100, Triethylcitrate, |
| | Talcum micron, Titanium Dioxide and Magnesium |
| | stearate |
| Number of tablets | 40 tablets (total mass tablet 150 mg) |
| Administrations | Per-os |

[0714] 3. PK Profiles for IV and PO Administration

[0715] The objective of this study was to investigate the PK profiles of IFN-α-2b(E41Q) following IV injection or oral administration (as enteric-coated tablets or enteric-coated capsules) to Cynomolgus monkeys. Several doses (0.8, 0.55, 0.45 and 0.2 mg/kg) of an IFN-α-2b(E41Q) enteric-coated tablet formulation, a single dose (0.9 mg/kg) of an IFN-α-2b(E41Q) enteric-coated capsule formulation, and a single dose (0.9 mg/kg) of a native IFN-α enteric-coated capsule formulation were tested by PO administration in Cynomolgus monkeys (Macaca fascicularis) in order to compare the PK and the systemic exposure profiles of the two proteins following oral administration.

[0716] As shown in Table 65 below, a total of six purposely bred Cynomolgus monkeys (Macaca fascicularis), three males and three females weighing between 2.8 and 5.4 kg were divided into three groups (one male and one female per group). Each group was used in three separate dosing experiments. Each dosing was separated by a wash-out period of 7-days to allow clearance of the protein from the blood of the animals between dosings. Each dose administered by the IV route was expressed in μg/kg and adjusted to individual body weight on the basis of body weight measured on the day of administration. Each dose administered by the oral route was expressed in mg/kg calculated on the basis of body weight measured on D-6. For the first dosing experiment, the three groups of naïve animals (referred to in Table 65 as Groups 1, 2 and 2 Duplicate), were injected IV with either 50 μg/kg of IFN-α-2b(E41Q) or native IFN-α (day 1) and monitored at time intervals over a period of 16 hours.

[0717] For the second dosing experiment, 7 days later, the three groups (the same animals from Groups 1, 2 and 2. Duplicates are referred to in Table 65 as Groups 3, 4 and 5, respectively, for the second dosing experiment), were given a dose of either 0.8 mg/kg of the enteric-coated tablet formulation of IFN-α-2b(E41Q), 0.9 mg/kg of the enteric-coated capsule formulation of IFN-α-2b(E41Q) or native IFN-α by PO route (day 9) and monitored at time intervals over a period of 24 hours.

[0718] For the third dosing experiment, 7 days later, the three groups (the same animals from Groups 3, 4 and 5, are referred to in Table 65 as Groups 6, 7 and 8, respectively, for the third dosing experiment), were given a dose of either 0.55, 0.45 or 0.2 mg/kg of the enteric-coated tablet formulation of IFN-α-2b(E41Q) by PO route (day 17) and monitored at time intervals over a period of 24 hours.

TABLE 65
Dosage and experimental detail for IV and PO study

| | | Group/ | | | | | |
|---|---|---|---|---|---|---|---|
| Group | Number | Treatment | | | | | Formulation |
| Number | of animals | Day | Route | Test item | Dose-level | | & Dosage |
| 1 | 1 male | Group 1/D1 | IV | Native IFN-α | 50 | μg/kg | Liquid 0.5 mL/kg |
| | 1 female | | | | | | Liquid 0.5 mL/kg |
| 2 | 1 male | Group 2/D1 | IV | IFN-α-2b(E41Q) | 50 | μg/kg | Liquid 0.5 mL/kg |
| | 1 female | | | | | | Liquid 0.5 mL/kg |
| 2 Duplicat | 1 male | Group 3/D1 | IV | IFN-α-2b(E41Q) | 50 | μg/kg | Liquid 0.5 mL/kg |
| | 1 female | | | | | | Liquid 0.5 mL/kg |
| 3 | 1 male | Group 1/D9 | PO | native IFN-α | 0.9 | mg/kg | 4 enteric-coated |
| | 1 female | | | | 0.9 | mg/kg | capsules/animal |
| | | | | | | | 3 enteric-coated |
| | | | | | | | capsules/animal |
| 4 | 1 male | Group 2/D9 | PO | IFN-α-2b(E41Q) | 0.9 | mg/kg | 3 enteric-coated |
| | 1 female | | | | 0.9 | mg/kg | capsules/animal |
| | | | | | | | 3 enteric-coated |
| | | | | | | | capsules/animal |
| 5 | 1 male | Group 3/D9 | PO | IFN-α-2b(E41Q) | 0.8 | mg/kg | 4 enteric-coated |
| | 1 female | | | | 0.8 | mg/kg | tablets/animal |
| | | | | | | | 4 enteric-coated |
| | | | | | | | tablets/animal |
| 6 | 1 male | Group 1/D17 | PO | IFN-α-2b(E41Q) | 0.55 | mg/kg | 5 enteric-coated |
| | 1 female | | | | 0.55 | mg/kg | tablets/animal |
| | | | | | | | 4 enteric-coated |
| | | | | | | | tablets/animal |
| 7 | 1 male | Group 2/D17 | PO | IFN-α-2b(E41Q) | 0.45 | mg/kg | 3 enteric-coated |
| | 1 female | | | | 0.45 | mg/kg | tablets/animal |
| | | | | | | | 3 enteric-coated |
| | | | | | | | tablets/animal |
| 8 | 1 male | Group 3/D17 | PO | IFN-α-2b(E41Q) | 0.2 | mg/kg | 1 enteric-coated tablet/animal |
| | 1 female | | | | 0.2 | mg/kg | 1 enteric-coated tablet/animal |

IV = intravenous;
PO = oral route;
D = day
Six animals in three groups were used repeatedly

[0719] At each time-point (day −1, 0, 0.033, 0.083, 0.17, 0.5, 1, 2, 4, 6, 8 and 16 h post-injection for IV administration and day −1, 0, 0.5, 1, 1.5, 2, 4, 6, 8, 12, 16 and 24 h post-administration for oral administration), a blood sample (1 mL) was taken from the saphenous or cephalic veins of all monkeys for the determination of the remaining antiviral activity levels of IFN-α-2b(E41Q) or native IFN-α in plasma. Blood samples were placed into pre-chilled tubes without anticoagulant and mixed with 70 μl of antiprotease solution. The blood samples were placed on wet ice or 4° C. followed by centrifugation at 4° C. for 10 minutes at 3000 rpm. Serum was divided into 3 propylene tubes (2 tubes with 100 μl and one tube with the rest) and immediately frozen and stored at −20° C.±2° C. until use.

[0720] Each animal was checked for mortality and clinical signs at least twice a day during the treatment period. The body weight of each animal was recorded at least twice during the pre-treatment period. PK parameters of liquid formulation of either IFN-α-2b(E41Q) and native IFN-α following IV administration to monkeys (50 μg/kg) are presented in Table 66 below (first dosing experiment).

TABLE 66
PK parameters for IV administration

| | Cᵢ | AUC_{(0-∞)} | Half-life |
|---|---|---|---|
| IV | (IU/mL) | (h-IU/mL) | (h) |
| IFN-α-2b(E41Q)- 50 μg/kg | 421031 | 322229 | 2 |
| Native IFN-α - 50 μg/kg | 375109 | 235200 | 0.5 |

[0721] The initial concentration (Ci) value obtained for IFN-α-2b(E41Q) was similar compared to native IFN-α (421031 IU/mL compared to 375109 IU/mL). An increase in AUC_{(0-∞)} of about 1.4-fold was observed for monkeys injected with IFN-α-2b(E41Q) compared to native IFN-α (322229 IU-h/mL for IFN-α-2b(E41Q) versus 235200 IU-h/mL for native IFN-α).

[0722] PK parameters of IFN-α-2b(E41Q) and native IFN-α after PO administration of the enteric-coated capsule formulation (0.9 mg/kg) to monkeys are presented in Table 67 below (data from second dosing experiment).

TABLE 67
PK parameters for PO (enteric-coated capsule) administration

| | Cₘₐₓ | Tₘₐₓ | AUC_{(0-∞)} | Half-life |
|---|---|---|---|---|
| Enteric-coated capsules | (IU/mL) | (h) | (h-IU/mL) | (h) |
| Native IFN-α - 0.9 mg/kg | — | — | — | — |
| IFN-α-2b(E41Q) - 0.9 mg/kg | 11795 | 4 | 55803 | 2.7 |

[0723] Similar to data obtained with rats after the oral administration of IFN-α-2b(E41Q) enteric-coated capsules (0.9 mg/kg), a significant antiviral activity was detected in monkey plasma with Cₘₐₓ values about 11795 IU/mL and AUC_{(0-∞)} parameter value about 55803 IU-hr/mL, whereas no activity was detected in animals treated with native IFN-α at the same dose (0.9 mg/kg).

[0724] PK parameters of IFN-α-2b(E41Q) enteric-coated tablet formulation after PO administration of several doses (0.8, 0.55, 0.45 and 0.2 mg/kg) to monkeys are presented in Table 68 below (data compiled from second and third dosing experiments).

TABLE 68
PK parameters for PO (enteric-coated tablet) administration

| | Cₘₐₓ | Tₘₐₓ | AUC_{(0-∞)} | Half-life |
|---|---|---|---|---|
| Enteric-coated tablets | (IU/mL) | (h) | (h-IU/mL) | (h) |
| Tablet - 0.8 mg/kg | 17165 | 1.5 | 84505 | 3.4 |
| Tablet - 0.55 mg/kg | 20300 | 1 | 100332 | 3.5 |
| Tablet - 0.45 mg/kg | 18686 | 1 | 54752 | 3.4 |
| Tablet - 0.2 mg/kg | 4190 | 1.5 | 10928 | 1.6 |

[0725] Significant antiviral activity was detected in monkey plasma after the administration of enteric-coated tablet formulation of IFN-α-2b(E41Q) for all doses. Values of Cₘₐₓ and AUC_{(0-∞)} obtained for IFN-α-2b(E41Q) administration at a dose of 0.8 mg/kg by enteric-coated tablets were higher compared to parameters obtained at a dose of 0.9 mg/kg by enteric-coated capsules (17165 IU/mL compared to 11795 IU/mL, respectively for Cₘₐₓ and 84505 IU-hr/mL compared to 55802 IU-hr/mL, respectively for AUC_{(0-∞)}). For the enteric-coated tablet formulation, both Cₘₐₓ and AUC_{(0-∞)} appeared to be dose-dependent and to saturate at a dose between 0.55 and 0.8 mg/kg. In addition, a dose-related half-life was obtained for IFN-α-2b(E41Q) in the systemic blood compartment with values about 4.3, 3.8, 3.4 and 1.6 h at doses of 0.8, 0.55, 0.45 and 0.2 mg/kg supporting the existence of a sustained delivery of IFN-α-2b(E41Q) from the intestinal compartment to the systemic circulation due to a slow absorption coupled with decreased susceptibility to intestinal protease degradation.

[0726] 4. Comparison of PK Profiles for PO Administered IFN-α-2b(E41Q) and SC Administered Native IFN-α and Intron A®

[0727] PK parameter data previously obtained for SC administration of Intron A® interferon or native IFN-α was compared to the PK data for PO administration of IFN-α-2b(E41Q) (enteric-coated tablets) and is presented in Table 69 below.

TABLE 69
Comparison of PK parameters for PO and SC administration

| | Cₘₐₓ | Tₘₐₓ | AUC(_{0-∞}) |
|---|---|---|---|
| | (IU/mL) | (h) | (h-IU/mL) |
| Tablet - 0.8 mg/kg | 17165 | 1.5 | 84505 |
| Tablet - 0.55 mg/kg | 20300 | 1 | 100332 |
| Tablet - 0.45 mg/kg | 18686 | 1 | 54752 |
| Native IFN-α - SC - 0.03 mg/kg | 23785 | 2 | 86618 |
| Intron A ® - SC - 0.03 mg/kg | 24809 | 1 | 102454 |

[0728] This comparison showed a similar AUC_{(0-∞)} after the SC administration of native IFN-α (0.03 mg/kg) and the oral administration of IFN-α-2b(E41Q) (0.55 mg/kg).

[0729] This result indicated that the amount of IFN-α-2b(E41Q) needed after oral administration to achieve a similar AUC as measured for the SC administration of native IFN-α was only 15-fold higher in monkeys.

[0730] 5. Bioavailability Analysis of PO Administration Versus IV Administration

[0731] The percentage bioavailability of either IFN-α-2b(E41Q) and native IFN-α following PO administration was calculated by comparison to the PK data for IV administration of IFN-α-2b(E41Q) and native IFN-α presented above in (1). For each dose and formulation of IFN-α-2b(E41Q) administered PO (enteric-coated capsule or tablet formulation) to monkeys, the percentage of IFN-α-2b(E41Q) bioavailability compared to IV administration was calculated relative to Cₘₐₓ and AUC_{(0-∞)}. Results are presented in Tables 70 and 71 below for enteric-coated capsules and enteric-coated tablets, respectively.

TABLE 70
Capsule formulation

| | PO administration | | IV administration | |
|---|---|---|---|---|
| | IFN-α- | native | IFN-α- | Native |
| capsule formulation | 2b(E41Q) | IFNα | 2b(E41Q) | IFNα |
| Dose (mg/kg) | 0.9 | 0.9 | 0.05 | 0.05 |
| AUC_{(0-∞)} (UI-hr/ml) | 55802 | — | 322229 | 235200 |
| Cₘₐₓ (UI/ml) | 11795 | — | 421031 | 375109 |
| | | — | | |
| Cmax/dose | 13106 | — | 8420620 | 7502180 |
| BA | 0.2 | — | | |
| ((Cmax/dose)_{Bel}/ | | — | | |
| (Cmax/dose)_{Bel-IV}) × | | | | |
| 100 | | | | |
| AUC/dose | 62002 | — | 6444580 | 4704000 |
| BA | 1.0 | — | | |
| (AUC/dose)_{Bel}/ | | | | |
| (AUC/dose)_{Bel-IV}) × | | | | |
| 100 | | | | |
| BA relative | 1.3 | — | | |
| (AUC/dose)_{Bel}/ | | | | |
| (AUC/dose)_{natif-IV}) × | | | | |
| 100 | | | | |

TABLE 71
Tablet formulation

| | PO administration | | | | | IV administration | |
|---|---|---|---|---|---|---|---|
| Tablet formulation | IFN-α-2b(E41Q) | | | | native IFNα | IFN-α-2b(E41Q) | Native IFNα |
| Dose (mg) | 0.8 | 0.55 | 0.45 | 0.2 | — | 0.05 | 0.05 |
| AUC_{(0-∞)} (UI-hr/ml) | 84505 | 100332 | 54752 | 10928 | — | 322229 | 235200 |
| Cₘₐₓ (UI/ml) | 17165 | 20300 | 18686 | 4190 | — | 421031 | 375109 |
| | | | | | — | | |
| Cmax/dose | 21456 | 36909 | 41524 | 20950 | — | 8420620 | 7502180 |
| BA | 0.3 | 0.4 | 0.5 | 0.2 | — | | |
| ((Cmax/dose)_{Bel}/(Cmax/dose)_{Bel-IV}) × 100 | | | | | | | |
| | | | | | — | | |
| AUC/dose | 105631 | 182422 | 121671 | 54640 | — | 6444580 | 4704000 |
| BA | 1.6 | 2.8 | 1.9 | 0.8 | — | | |
| (AUC/dose)_{Bel}/(AUC/dose)_{Bel-IV}) × 100 | | | | | | | |
| BA relative | 2.2 | 3.9 | 2.6 | 1.2 | — | | |
| (AUC/dose)_{Bel}/(AUC/dose)_{natif-IV}) × 100 | | | | | | | |

[0732] The percentage of bioavailability calculated for IFN-α-2b(E41Q) enteric-coated tablet formulation at a dose of 0.8 mg/kg is higher compared to IFN-α-2b(E41Q) enteric-coated capsule formulation at a dose of 0.9 mg/kg after PO administration to monkeys (1.6% versus 1.0%, respectively).

[0733] Calculation of bioavailability of IFN-α-2b(E41Q) enteric-coated tablet formulation after PO administration at several doses (0.8, 0.55, 0.45 and 0.2 mg/kg) showed that doses of 0.55 mg/kg and to a lesser extent of 0.45 mg/kg are optimum strengths (the bioavailability percentage is about 2.6% and 1.9% at doses of 0.55 mg/kg and 0.45 mg/kg, respectively compared to 1.6% and 0.8% at doses of 0.8 mg/kg and 0.2 mg/kg, respectively).

[0734] 6. Summary

[0735] IFN-α-2b(E41Q) can be efficiently delivered to monkey blood circulation by the oral route, as a lyophilized protein (enteric-coated capsules or enteric-coated tablets).

[0736] A significant antiviral activity was observed in the systemic blood circulation of monkeys after PO administration of both enteric-coated tablet and enteric-coated capsule formulations of IFN-α-2b(E41Q) whereas no antiviral activity was observed with native IFN-α given PO. The results in monkeys were in accord with previous data obtained in rats after gavage and PO administrations of liquid and enteric-coated capsule formulations of IFN-α-2b(E41Q), respectively. In addition, the PK profile observed after oral delivery mimicked the biphasic profile previously observed in rats indicative of sustained delivery over time, from an “intestinal compartment” into the blood. This also was supported by the dose-related half-life observed for IFN-α-2b(E41Q) in the systemic blood compartment.

[0737] The percentage of bioavailability calculated for the IFN-α-2b(E41Q) enteric-coated tablet formulation at the highest dose was increased about 60% compared to the one seen for the enteric-coated capsule formulation at a similar dose. Enteric-coated tablet formulation administration of IFN-α-2b(E41Q) at several doses was dose-dependent between 0.2 mg/kg to 0.55 mg/kg and saturated at doses between 0.55 mg/kg and 0.8 mg/kg. The bioavailability percentage was about 2.6% (relative to IV IFN-α-2b(E41Q) AUC_{(0-∞)}) and 3.2% (relative to native IFN-α AUC_{(0-∞)}) with an optimum strength of about 0.55 mg/kg of IFN-α-2b(E41Q).

### Example 12

### Pharmacokinetics and Immunogenicity of IFN-α-2b(E41Q) Following Oral Administration in Cynomolgus Monkeys

[0738] The purpose of this study was to assess the pharmacokinetics, immunogenicity and influence of anti-IFN-α-2b(E41Q) antibodies on PK profile of IFN-α-2b(E41Q) when administered daily by PO route to Cynomolgus (Macaca fascicularis) monkeys via enteric-coated tablets for 2 weeks. The Macaca fascicularis monkey was chosen because of its acceptance as a predictor of pharmacological effects for this class of drugs in humans.

[0739] 1. General Procedures

[0740] Repeated PO administrations of IFN-α-2b(E41Q) enteric-coated tablet formulations with doses of 0.6, 1.2 and 2.4 mg per animal were performed daily over 2 weeks in eighteen Cynomolgus monkeys (Macaca fascicularis), nine males and nine females, bred in captivity. The females were nulliparous and nonpregnant. At the start of the treatment, the animals were 2 to 3 years old, and their weight was between 2 and 3 kg. Blood samples were taken from all the animals for the determination of plasma levels of IFN-α-2b(E41Q) (pharmacokinetic studies) and for the measurement of both total and neutralizing anti-IFN-α antibody levels (antibody determination assays) in monkey serum.

[0741] The following treatment groups were established according to Table 72 below:

TABLE 72
Treatment groups for PO (enteric-coated tablet) administration

| | | Dose level | | | |
|---|---|---|---|---|---|
| | | | Number of | | |
| | | | IFN-α-2b(E41Q) | | |
| | | | enteric-coated | | |
| | | | tablet (B) and | | |
| | | mg | enteric-coated | No. animals | |
| | | protein/ | placebo | | Fe- |
| Group | Treatment | animal | tablet (P) | Males | males |
| 1 | Control | — | 4 P | 3 | 3 |
| 2 | IFN-α-2b(E41Q) | 0.6 | 1B + 3P | 3 | 3 |
| 3 | IFN-α-2b(E41Q) | 1.2 | 2B + 2 P | 3 | 3 |
| 4 | IFN-α-2b(E41Q) | 2.4 | 4B | 3 | 3 |

[0742] Repeated PO administration of IFN-α-2b(E41Q) enteric-coated tablet formulation with doses of 0.6 mg, 1.2 mg and 2.4 mg per animal were performed daily over 2 weeks. Since the weight of male and female monkeys included in this study is about 3 and 2 kg, respectively, the dose of 0.6 mg/animal corresponded to 0.3 mg/kg and 0.2 mg/kg for females and males respectively; the dose of 1.2 mg/animal corresponded to 0.6 mg/kg and 0.4 mg/kg for females and males respectively; and the dose of 2.4 mg/animal corresponded to 1.2 mg/kg and 0.8 mg/kg for females and males respectively. For each dose level, three males and three females were used. The control group received enteric-coated placebo tablets only.

[0743] Blood samples (2 mL) were taken from all the animals at pre-dose and 24 h after administration at days 1, 6, and 13. The samples were stored in ice baths/cryoracks followed by centrifugation at 1620 g for 15 minutes at 4° C. in order to obtain serum. Samples were transferred to two fresh polypropylene vials (approx. 300 μl) and stored at −70° C. until use. The plasma samples were used for i) the determination of plasma levels of IFN-α-2b(E41Q) and ii) the measurement of both total and neutralizing anti-IFN-α-2b(E41Q) antibodies in monkey serum. For each tested dose, both total and neutralizing anti-IFN-α-2b(E41Q) antibodies were determined using the human anti-IFN-α antibody ELISA (for measuring total antibodies) according to the manufacturer's instructions (A4-203—MDS Pharma Services, Zurich, Switzerland) and Kawade's assay (for measuring neutralizing antibodies; Kawade et al., J. Interferon Research, 1987, Grossberg et al., J. Interferon Cytokines Research; 2001; Grossberg et al., Biotherapy; 1997; Kawade Y., J. Interferon Research, 1980; 1:61-70; Kawade et al., J. Immunological Methods, 2003).

[0744] 2. Drug Batches

[0745] For the pharmacokinetic and immunogenicity studies presented in this Example, one IFN-α-2b(E41Q) batch was used: G055/060118T (described in Example 4). As a control, enteric-coated placebo tablets were used. Specifications and routes of administration for the experimental and placebo batches are presented in Tables 73(a and b) below.

TABLE 73a
IFN-α-2b(E41Q) Batch # G055/060118T

| | |
|---|---|
| Correspondence | 335 MIU = 1 mg |
| MIU vs. mg | |
| Presentation | Enteric-coated tablets containing 0.603 mg of |
| | lyophilized IFN-α-2b(E41Q) and lactose |
| | monohydrate 64.1 mg; microcrystalline cellulose 27 |
| | mg; polyvidone kollidon 25 1.8 mg; crospovidone |
| | polyplasdone XL 3.6 mg; magnesium stearate 1.8 |
| | mg. Enteric-coated tablets are coated with gastric- |
| | resistant coating Eudragit S100; triethyl citrate, |
| | Talcum micron, Titanium Dioxide and Magnesium |
| | stearate. |
| Number of tablets | 774 tablets (total mass tablet 150 mg) |
| Administrations | Per-os |

TABLE 73b
Placebo Batch # P-2154/060711T

| | |
|---|---|
| Correspondence | None |
| MIU vs. mg | |
| Presentation | Enteric-coated tablets containing lactose |
| | monohydrate 64.1 mg; microcrystalline cellulose 27 |
| | mg; polyvidone kollidon 25 1.8 mg; crospovidone |
| | polyplasdone XL 3.6 mg; magnesium stearate 1.8 |
| | mg. Enteric-coated tablets are coated with gastric- |
| | resistant coating Eudragit S100; triethyl citrate, |
| | Talcum micron, Titanium Dioxide and magnesium |
| | stearate. |
| Number of tablets | 202 tablets (total mass tablet 150 mg) |
| Administrations | Per-os |

[0746] 3. Neutralizing and Total Anti-IFN-α-2b(E41Q) Antibodies

[0747] Using the human anti-IFN-α antibody ELISA and Kawade's assay for measuring total and neutralizing antibodies, respectively (both assays are described in Example 10), no anti-IFN-α-2b(E41Q) antibodies (total or neutralizing antibodies) were detected in the pre-dose serum or in the samples taken at days 2, 7 and 14 after daily administration of IFN-α-2b(E41Q) enteric-coated tablets. In each case, the antibody concentrations (for total antibodies) or Kawade titers (for neutralizing antibodies) measured in all monkey serum were below the background levels measured in the pre-dose samples.

[0748] A previous serum sample taken at day D26 from male 12 monkey administered subcutaneously twice a week with IFN-α-2b(E41Q) at dose of 1.26 MIU/kg was used as positive control in total antibody titer determination assay (ELISA from MDS Pharma Services). The value obtained for this sample was 12.6±1.7 IU/ml. The corresponding value obtained with Bender Medsystems Immunoassay Kit was 4299 ng/ml. The positive titer determined for male 12 monkey validated the data showing no total antibody detected in monkey serum from the two-week oral (enteric-coated tablets) toxicity study.

[0749] 4. PK Profile for Day 1 Administration

[0750] Plasma samples were taken at intervals for 24 h following the day 1 dose with enteric-coated placebo tablets and IFN-α-2b(E41Q) treated animals for the determination of IFN-α-2b(E41Q) PK. The amount of remaining IFN-α-2b(E41Q) in plasma of monkeys given enteric-coated placebo tablets or 0.6, 1.2 and 2.4 mg IFN-α-2b(E41Q) enteric-coated tablets per animal, was determined by the antiviral activity assay as described in Example 1 above.

[0751] PK parameters of IFN-α-2b(E41Q) enteric-coated tablet formulation after PO administration to monkeys at day 1 with doses of 0.6, 1.2 and 2.4 mg per animal are provided in Table 74 below. Means of both male and female monkey PK parameters for each dose of IFN-α-2b(E41Q) are shown.

TABLE 74
PK parameters for PO (enteric-coated tablet) administration Day 1

| | Cₘₐₓ | Tₘₐₓ | AUC_{(0-∞)} | AUC₍₀₋ₜ₎ |
|---|---|---|---|---|
| Enteric-coated tablets | (IU/mL) | (h) | (h-IU/mL) | (h-IU/mL) |
| IFN-α-2b(E41Q) - 0.6 mg | 1473 | 1 | 7767 | 7767 |
| IFN-α-2b(E41Q) - 1.2 mg | 1876 | 1 | 12948 | 12662 |
| IFN-α-2b(E41Q) - 2.4 mg | 5496 | 1 | 32923 | 32918 |

[0752] Similar to previous data obtained from the pharmacokinetic study (Example 11) performed in Cynomolgus monkeys after PO administration of either enteric-coated capsule or enteric-coated tablet formulations of IFN-α-2b(E41Q), a significant antiviral activity was detected in all monkey plasma (both male and female) samples for each dose.

[0753] A good dose-dependent correlation was observed between the 0.6 mg and 2.4 mg tested doses of IFN-α-2b(E41Q) administered to monkeys and Cₘₐₓ measured from the respective PK profiles. For monkeys injected with 0.6 mg, the Cₘₐₓ mean value was 1473 IU/mL compared to 5496 IU/mL for the 2.4 mg dose. Similarly, the AUC₍₀₋ₜ₎ mean value for monkeys administered with 0.6 mg was about 7767 IU-hr/mL compared to 32918 IU-hr/mL for the 2.4 mg dose. A dose-dependent relationship also was observed with the intermediate dose (1.2 mg per animal) for the AUC₍₀₋ₜ₎ parameter (12662 IU-hr/mL versus 7767 IU-hr/mL with a dose of 0.6 mg) and a lesser correlation was observed for Cₘₐₓ (1876 IU/mL versus 1473, for a dose of 0.6 mg per animal).

[0754] 5. PK Profile for Day 14 Administration

[0755] Plasma samples were taken at intervals for 24 h following the day 14 dose with enteric-coated placebo tablets and IFN-α-2b(E41Q) treated animals for the determination of the IFN-α-2b(E41Q) PK profile. The amount of remaining IFN-α-2b(E41Q) in plasma of monkeys given enteric-coated placebo tablets or 0.6, 1.2 and 2.4 mg IFN-α-2b(E41Q) enteric-coated tablets per animal, was determined by the antiviral activity assay as described in Example 1.

[0756] PK parameters of IFN-α-2b(E41Q) enteric-coated tablet formulation after PO administration to monkeys at day 14 with doses of 0.6, 1.2 and 2.4 mg per animal are provided in Table 75 below. Means of both male and female monkey PK parameters for each dose of IFN-α-2b(E41Q) are shown.

TABLE 75
PK parameters for PO (enteric-coated tablet) administration Day 14

| | Cₘₐₓ | Tₘₐₓ | AUC_{(0-∞)} | AUC₍₀₋ₜ₎ |
|---|---|---|---|---|
| Enteric-coated tablets | (U/mL) | (h) | (h-IU/mL) | (h-IU/mL) |
| IFN-α-2b(E41Q) - 0.6 mg | 1977 | 1 | 11021 | 10975 |
| IFN-α-2b(E41Q) - 1.2 mg | 3488 | 1 | 27021 | 26981 |
| IFN-α-2b(E41Q) - 2.4 mg | 5360 | 2 | 40834 | 40768 |

[0757] Similar to the PK profiles obtained with IFN-α-2b(E41Q) enteric-coated tablet administration at day 1, a good correlation was observed between all tested doses of IFN-α-2b(E41Q) (0.6, 1.2 and 2.4 mg) administered to monkeys and the Cₘₐₓ measured from the respective PK profiles. For monkeys injected with 0.6 mg, the Cₘₐₓ mean value was 1977 IU/mL compared to 3488 IU/mL with a dose of 1.2 mg and 5360 IU/mL with a dose of 2.4 mg. Similarly, the AUC₍₀₋ₜ₎ mean value for monkeys administered with 0.6 mg is about 10975 IU-hr/mL compared to 26981 IU-hr/mL with a dose of 1.2 mg and 40768 IU-hr/mL with a dose of 2.4 mg.

[0758] In addition, no impairment of PK profiles obtained for each dose of IFN-α-2b(E41Q) enteric-coated tablets (0.6, 1.2 and 2.4 mg per animal) was observed at day 14 compared to day 1. This observation was supported by the AUC₍₀₋ₜ₎ and Cₘₐₓ mean values measured from all PK profiles which were very closed for all IFN-α-2b(E41Q) doses tested from day 1 to day 14 (1473 IU/mL versus 1977 IU/mL for the Cₘₐₓ at day 1 and 14 respectively with a dose of 0.6 mg; 5496 IU/mL versus 5360 IU/mL for the Cₘₐₓ at day 1 and 14 respectively with a dose of 2.4 mg; 7767 IU-hr/mL versus 10975 IU/mL for the AUC₍₀₋ₜ₎ at day 1 and 14 respectively with a dose of 0.6 mg and 32918 IU-hr/mL versus 40768 IU/mL for the AUC₍₀₋ₜ₎ at days 1 and 14, respectively with a dose of 2.4 mg).

[0759] Furthermore, all these PK observations strongly supported the lack of total and neutralizing antibodies evidenced in monkey serum at day 14 after daily PO administration of the IFN-α-2b(E41Q) enteric-coated tablet formulation at doses of 0.6, 1.2 and 2.4 mg per animal over 2 weeks.

[0760] 6. Summary

[0761] No neutralizing or total antibody levels to IFN-α-2b(E41Q) were detected with doses of 0.6, 1.2 and 2.4 mg per animal in monkey serum after daily PO administration of IFN-α-2b(E41Q) enteric-coated tablets over 2 weeks. Similar to previous data obtained from the pharmacokinetic study (Example 11) performed in Cynomolgus monkeys after PO administration of either enteric-coated capsule or enteric-coated tablet formulations of IFN-α-2b(E41Q), a significant antiviral activity was detected in all monkey plasma (both male and female) samples for each tested dose. No impairment of the pharmacokinetic profile of IFN-α-2b(E41Q) was observed at day 14 with doses of 0.6, 1.2 and 2.4 mg after daily administration by the oral route of IFN-α-2b(E41Q) enteric-coated tablets over 2 weeks, supporting the lack of detection of antibodies in monkey serum at day 14.

### Example 13

### Pharmacokinetic Study Subcutaneous (SC) Administration of IFN-α-2b(E41Q) in Mice

[0762] The PK profile of subcutaneously administered IFN-α-2b(E41Q) in mice compared to native IFN-α and Pegasys® interferon, a commercial IFN-α-2a protein, which is modified by pegylation, was determined. A single dose pharmacokinetic profile of SC administered IFN-α-2b(E41Q) (0.4 MIU/mouse; 1.3 μg/mouse or 65 μg/kg) was compared in vivo to native IFN-α (0.4 MIU/mouse dose) and Pegasys® interferon (18 μg/mouse, 720 μg/kg or 36 μg/mouse, 1440 μg/kg). 12 male mice were used for each subcutaneous administration. All mice received injections on the same day. Blood (200 μl) was collected at 0.5, 1, 2, 4, 6, 8, 10, 12, 16, 24, 36 and 48 hours after injection. PK profiles were determined as described in Example 9. PK parameters for IFN-α-2b(E41Q), native IFN-α, and Pegasys® interferon are presented in Table 76 below.

TABLE 76
PK parameters for SC administration

| | | | | Half-life (t_{1/2}) |
|---|---|---|---|---|
| | Cₘₐₓ | Tₘₐₓ | AUC_{(0-∞)} | Elimination |
| Molecule | (U/mL) | (h) | (h-IU/mL) | time (h) |
| IFN-α-2b(E41Q) | 60.2 | 1 | 3487 | 56.2 |
| Native IFN-α | 88.7 | 1 | 536 | 1.6 |
| Pegasys ® (18 μg/mouse) | 38.0 | 12 | 1312 | 39.0 |
| Pegasys ® (36 μg/mouse) | 65.7 | 12 | 2870 | 35.1 |

[0763] The PK profile in mice receiving SC IFN-α-2b(E41Q) compared to native IFN-α showed a higher AUC_{(0-∞)} and t_{1/2}. For AUC_{(0-∞)}, a 6.5-fold increase was observed, 3,487 for IFN-α-2b(E41Q) versus 536 for native IFN-α. For half-life, a 35-fold increase was observed, 56 h for IFN-α-2b(E41Q) versus 2 h for native IFN-α. The PK parameters obtained from SC administration of IFN-α-2b(E41Q) compared to Pegasys® interferon showed a slightly higher AUC_{(0-∞)} (a 1.45-fold increase of 3,487 for IFN-α-2b(E41Q) versus 2,870 for Pegasys® interferon and a longer half-life t_{1/2} (a 1.3-fold increase of 56 h for IFN-α-2b(E41Q) versus 39 h for Pegasys® interferon.

### Example 14

### Pharmacokinetic and Pharmacodynamic Toxicity Study of Multi-Dose SC Administration of IFN-α-2b(E41Q) in Non-Human Primates

[0764] The PK profile and pharmacodynamic effects of IFN-α-2b(E41Q) following subcutaneous administration was determined for separate administrations of a multi-dose regimen.

[0765] 1. Comparison of IFN-α-2b(E41Q), Native IFN-α, and Intron A®

[0766] The PK profile of subcutaneously administered IFN-α-2b(E41Q) in Cynomolgus monkeys (Macaca fascicularis) compared to native IFN-α and the commercial recombinant IFN-α-2b protein Intron A® interferon was determined. The study was designed to investigate the pharmacokinetic, pharmacodynamic, preliminary clinical safety/pathology and immunogenicity, on dose-dependent effects in monkeys. For each group, IFN-α-2b(E41Q), native IFN-α or Intron A® interferon, 1 male and 1 female monkey was used. The following dosing regimen for subcutaneous administration of IFN-α-2b(E41Q), native IFN-α and Intron A® interferon, shown in Table 77 below were employed.

TABLE 77
Dosing regimen for SC administration (IFN-α-
2b(E41Q); native IFN-α; Intron A ®)

| Day | IFN-α-2b(E41Q) | | Native IFN-α | | Intron A ® | |
|---|---|---|---|---|---|---|
| 1 | 0.03 | mg/kg | 0.03 | mg/kg | buffer | |
| | (9 | MIU/kg) | (9 | MIU/kg) | | |
| 4 | 0.30 | mg/kg | 0.30 | mg/kg | buffer | |
| | (90 | MIU/kg) | (90 | MIU/kg) | | |
| 8 | 1.00 | mg/kg | 1.00 | mg/kg | 0.03 | mg/kg |
| | (300 | MIU/kg) | (300 | MIU/kg) | (9 | MIU/kg) |
| 12 | 3.00 | mg/kg | 3.00 | mg/kg | 0.30 | mg/kg |
| | (900 | MIU/kg) | (900 | MIU/kg) | (90 | MIU/kg) |

Washout Period

| | | | | | | |
|---|---|---|---|---|---|---|
| 66 | 0.03 | mg/kg | 0.03 | mg/kg | 0.03 | mg/kg |
| | (9 | MIU/kg) | (9 | MIU/kg) | (9 | MIU/kg) |
| 72 | 0.03 | mg/kg | 0.03 | mg/kg | 0.03 | mg/kg |
| | (9 | MIU/kg) | (9 | MIU/kg) | (9 | MIU/kg) |
| 78 | 0.30 | mg/kg | 0.30 | mg/kg | 0.30 | mg/kg |
| | (90 | MIU/kg) | (90 | MIU/kg) | (90 | MIU/kg) |

[0767] The following assessments were performed: (i) determination of serum concentration from in vitro antiviral assay (IFN-α-2b(E41Q) and native IFN-α at days 1, 4 over 72 h; at days 66, 72, 78 over 120 h; Intron A® interferon at days 8, 12 over 72 h; at days 66, 72, 78 over 120 h); (ii) RT-PCR assay for mRNA expression of IFN-α inducible genes which are markers of antiviral activity, such as 2′5′ OAS, neopterin, and MxA, (IFN-α-2b(E41Q) and native IFN-α at days 1, 4 over 72 h; at days 66, 72, 78 over 24 h (neopterin over 120 h); Intron A® at days 8, 12 over 72 h; at days 66, 72, 78 over 24 h (neopterin over 120 h)); (iii) urinary excretion: pre-dose, days 3, 10; (iv) measurement of total and neutralizing antibodies (pre-dose and at days 16, 21 and 28); (v) assays for various safety and lab parameters such as clinical signs, mortality, body weight, and post-mortem exam. PK parameters calculated from the in vitro antiviral assay results are presented in Table 78 below.

TABLE 78
PK parameters for SC administration

| | Cₘₐₓ | Tₘₐₓ | AUC₍₀₋₇₂₎ | AUC_{(0-∞)} | Half-life |
|---|---|---|---|---|---|
| Molecule | (μg/mL) | (h) | (h-IU/mL) | (h-IU/mL) | (t_{1/2}) (h) |
| IFN-α-2b(E41Q) | 25382 | 1-4 | 1023638 | 1579965 | 44.9 |
| Native IFN-α | 23785 | 2 | 86618 | 86916 | 2.02 |
| Intron A ® | 24809 | 1 | 102454 | 102692 | 2.28 |

[0768] From these studies, it was observed that the AUC_{(0-∞)} for SC administration of IFN-α-2b(E41Q) was 15 times larger than Intron A® interferon and 18 times larger than native IFN-α. The half-life t_{1/2} for SC administration of IFN-α-2b(E41Q) was 22 times longer than native IFN-α, and 20 times longer than Intron A®. IFN-α-2b(E41Q) induced markers of antiviral activity similar to Intron A® and native IFN-α. Urinary excretion was not remarkable and no relevant signs of clinical pathology or toxicity were evidenced, though all compounds induced antibody production.

[0769] 2. Comparison of IFN-α-2b(E41Q) and Pegasys® Interferon

[0770] In a separate experiment, the PK profile of subcutaneously administered IFN-α-2b(E41Q) in Cynomolgus monkeys (Macaca fascicularis) was compared to the pegylated IFN-α-2a product Pegasys® interferon. For each group, IFN-α-2b(E41Q) or Pegasys®, 1 male and 1 female monkey was used. The following dosing regimen for subcutaneous administration of IFN-α-2b(E41Q) or Pegasys® interferon shown in Table 79 below was employed.

TABLE 79
Dosing regimen for SC
administration (IFN-α-2b(E41Q); Pegasys ®)

| | IFN-α- | Pegasys ® |
|---|---|---|
| Day | 2b(E41Q) | interferon |
| 1 | 0.03 mg/kg | buffer |
| | (9 MIU/kg) | |
| 7 | 0.03 mg/kg | 0.30 mg/kg |
| | (9 MIU/kg) | |
| 13 | 0.30 mg/kg | 0.30 mg/kg |
| | (90 MIU/kg) | |

[0771] The following assessments were performed: (i) determination of serum concentration from in vitro antiviral assay (IFN-α-2b(E41Q) and Pegasys® interferon at days 1, 7, 13 over 120 h); (ii) RT-PCR assay for mRNA expression of IFN-α inducible genes which are markers of antiviral activity, such as 2′5′ OAS, neopterin, and MxA (IFN-α-2b(E41Q) and Pegasys® interferon at days 1, 7, 13 over 24 h (neopterin over 120 h)); (iii) urinary excretion (pre-dose, days 3, 10); (iv) measurement of total and neutralizing antibodies (pre-dose, days 21, 28, 35); (v) assays for various safety and lab parameters such as clinical signs, mortality, body weight, and post-mortem exam. PK parameters calculated from the in vitro antiviral assay results are presented in Table 80 below.

TABLE 80
PK parameters for SC administration

| | Cₘₐₓ | Tₘₐₓ | AUC₍₀₋₁₂₀₎ | AUC_{(0-∞)} | Half-life |
|---|---|---|---|---|---|
| Molecule | (μg/mL) | (h) | (h-IU/mL) | (h-IU/mL) | (t_{1/2}) (h) |
| IFN-α-2b(E41Q) | 83700 | 2-4 | 4304238 | 6382257 | 44.7 |
| Pegasys ® | 47351 | 48 | 2256184 | 2279809 | 33.9 |

[0772] From these studies, it was observed that IFN-α-2b(E41Q) had an AUC_{(0-∞)} 3 times larger than Pegasys® interferon, and a similar half-life t_{1/2}. IFN-α-2b(E41Q) (0.03 mg/kg) and Pegasys® interferon (0.30 mg/kg) displayed similar plasma profiles for markers of antiviral activity. Urinary excretion was not remarkable and no relevant signs of clinical pathology or toxicity were evidenced, though both compounds induced antibody production.

### Example 15

### Toxicity Study of SC Administered IFN-α-2b(E41Q) in Cynomolgus Monkeys

[0773] The toxicokinetic profile of IFN-α-2b(E41Q) was evaluated as part of a 13-week, repeated dose toxicity study in Cynomolgus monkeys treated subcutaneously twice a week at doses of 0.14 MIU/kg (0.47 μg/kg), 0.42 MIU/kg (1.40 μg/kg) and 1.26 MIU/kg (4.20 μg/kg). For each group 3 male and 3 female monkey were used. Sample of peripheral blood for determination of IFN-α-2b(E41Q) levels were obtained from all monkeys at pre-dose, 0.5, 1, 2, 4, 8, and 24 after dosing on day 1. Peripheral blood samples for cumulative exposure also were obtained at these same time points on days 26 and 89. The level of IFN-α-2b(E41Q) in the blood was determined using an in vitro antiviral assay (see Example 9). PK parameters for IFN-α-2b(E41Q) calculated from the in vitro antiviral assay results for days 1, 26 and 89 are presented in Tables 81(a-c), respectively.

TABLE 81a
PK parameters for SC administration (day 1)

| | 0.14 MIU/kg* | | 0.42 MIU/kg | | 1.26 MIU/kg | |
|---|---|---|---|---|---|---|
| Day 1 | Females | Males | Females | Males | Females | Males |
| Cₘₐₓ (IU/ml) | 3164 | 3699 | 5918 | 6718 | 30549 | 30272 |
| AUC₍₀₋ₜ₎ (IU- | 55412 | 63067 | 132774 | 149281 | 571157 | 658053 |
| hr/ml) | | | | | | |

TABLE 81b
PK parameters for SC administration (day 26)

| | |
|---|---|
| 0.42 MIU/kg | 1.26 MIU/kg |

| Day 26 | Females | Males | Females | Males |
|---|---|---|---|---|
| Cₘₐₓ (IU/ml) | 1564 | 1121 | 3428 | 3911 |
| AUC₍₀₋ₜ₎ (IU-hr/ml) | 29267 | 24572 | 76290 | 78016 |

TABLE 81c
PK parameters for SC administration (day 89)

| | |
|---|---|
| 0.42 MIU/kg | 1.26 MIU/kg |

| Day 89 | Female | Male | Females | Males |
|---|---|---|---|---|
| Cₘₐₓ (IU/ml) | 23256 | 13546 | 14328 | 22781 |
| AUC₍₀₋ₜ₎ (IU-hr/ml) | 312930 | 226514 | 310767 | 448896 |

*No PK parameter values were calculated for the 0.14 MIU/kg dose at days 26 and 89 since IFN-α-2b(E41Q) serum levels were below the detection range limits of the antiviral assay.

[0774] As a result of this study, it was observed that SC injection of IFN-α-2b(E41Q) at doses of 0.14, 0.42 and 1.26 MIU/kg was associated with dose-related increases in Cₘₐₓ and AUC after the first administration. After 4 and 13 weeks of treatment, the detection of IFN serum levels was impeded by the development of neutralizing antibody titers in some animals.

### Example 16

### Toxicology Studies

### A. Rats

[0775] 1. Acute Toxicity Study in the Rat by the Oral Route

[0776] The acute toxicity of IFN-α-2b(E41Q) was evaluated in rats following a single oral route administration by gavage cannula of 2.4 mg/rat (9 mg/kg) of protein by administration of three enteric-coated capsules (0.8 mg each; size 9 enteric-coated capsules). Six female rats (7-9 week SPF Sprague-Dawley rats, each weighing 255.2 g to 274.3 g), with free access to food and water, were used for the experiment. Following administration with IFN-α-2b(E41Q) for 14 days, mortality, clinical signs, functional and neurobehavioral tests, body temperature and body weight were monitored. At the end of the observation period, all animals were sacrificed and post-mortem examinations were performed.

[0777] No animals dosed with enteric-coated capsules of IFN-α-2b(E41Q) administered at 2.4 mg/rat (9 mg/kg) died during the observation period. No effect on body temperature was seen in females and, for the majority of animals, no effect on body weight gain was observed. Four out of six females showed decrease in grip strength and five out of six females showed decrease in body tone and abdominal tone 24 h post-dose. No macroscopic findings were recorded at necropsy.

[0778] In summary, IFN-α-2b(E41Q) administered once by the oral route at a dose of 2.4 mg/rat (9 mg/kg) in the Sprague-Dawley females did not induce mortality but induced a decrease in muscle tone 24 h post-dose. The median lethal dose (LD₅₀) of IFN-α-2b(E41Q) after oral administration to female rats observed over a period of 14 days was greater than 9 mg/kg of body weight.

[0779] 2. 2-Week Oral Toxicity Study in Rats by the Oral Route

[0780] The study involved assessment of four main groups of rats and four satellite groups of rats following administration with various doses of IFN-α-2b(E41Q) by oral route. The main groups were used to assess toxicity based on mortality and clinical signs. The satellite groups were used for toxicokinetic assessment (see results in Example 10) and antibody analysis (see results in Example 20.B).

[0781] A total of forty-eight (SPF) Sprague-Dawley rats at 8-weeks old (twenty-four males and twenty-four females, divided equally among the groups (six animals/sex/group); weighing 250-350 g) were used in the study. The four treatment groups (for each of the main and satellite groups, for a total of eight groups) are set forth in Table 82 below:

TABLE 82
Toxicology Treatment Groups

| | | | | Satellite | |
|---|---|---|---|---|---|
| | | Main (No. of | | (No. of | |
| | | mice/group) | | mice/group) | |
| Group (IFN-α-2b(E41Q) dose) | | Male | Female | Male | female |
| 1. | vehicle alone (one size 9 | 6 | 6 | 6 | 6 |
| | enteric-coated placebo capsule) | | | | |
| 2. | 0.2 mg/rat (1 mg/kg for | 6 | 6 | 6 | 6 |
| | females and 0.6 mg/kg for | | | | |
| | males) | | | | |
| 3. | 0.4 mg/rat (2 mg/kg for | 6 | 6 | 6 | 6 |
| | females and 1.2 mg/kg for | | | | |
| | males) | | | | |
| 4. | 0.6 mg/rat (3 mg/kg for | 6 | 6 | 6 | 6 |
| | females and 1.8 mg/kg for | | | | |
| | males) | | | | |

[0782] Animals received oral administration of IFN-α-2b(E41Q) enteric-coated capsules (one size 9 enteric-coated capsule) daily for 2 weeks at the dose indicated above for the respective group, for a total of fourteen administrations. Animals from the main groups were observed twice a day for mortality and clinical signs. They were weighed at days −1, 3, 7, 10 and 14 and before sacrifice. Body temperature was recorded before administrations at days 1, 7, 14 and also 1 h after treatment. Opthalmoscopic examinations and blood analyses were performed at pre-dose and at days 7 and 14 of the administration period. Hematology, clinical biochemistry and urinalysis examinations were conducted prior to the first dose and at days 8 and 15. At the end of the treatment period, a full necropsy and a histopathologic examination were conducted on all animals of the main groups.

[0783] The rats from the satellite groups were separately assessed for toxicokinetic and immunogenicity studies. Blood samples for the determination of the plasma levels of IFN-α-2b(E41Q) (toxicokinetics) were taken at days corresponding to administrations days 1, 7 and 14 at pre-dose, 1, 2, 4, 8 and 24 h. Methods and results are reported separately in Example 10. Blood samples for immunogenicity studies (assessment of total and neutralizing antibodies) were taken at pre-dose and at day 15 after administration. Methods and results are reported in Example 20.B.

[0784] a. Toxicity Results in Main Group

[0785] i. Unscheduled Deaths

[0786] No mortality or unscheduled deaths were observed in the rats upon treatment with any dose of IFN-α-2b(E41Q) tested or vehicle alone. One male dosed with 0.6 mg/rat IFN-α-2b(E41Q) presented with a difficulty in respiration and was euthanized for ethical reasons and necropsied at day 10. The animal had lesions in the esophagus and around the trachea likely as a result of the dosing.

[0787] ii. Clinical Signs

[0788] A decrease in body tone was observed in two males and two females dosed at 0.2 mg/rat with IFN-α-2b(E41Q), one male and two females dosed at 0.4 mg/rat with IFN-α-2b(E41Q) and three males dosed at 0.6 mg/rat with IFN-α-2b(E41Q). In addition, one male and one female dosed at 0.2 mg/rat with IFN-α-2b(E41Q), one female dosed at 0.4 mg/rat with IFN-α-2b(E41Q) and three males dosed at 0.6 mg/rat with IFN-α-2b(E41Q) showed a decrease in abdominal tone. Similar observations were made with the vehicle alone placebo for one male (in body tone) and some females (in abdominal tone and body tone).

[0789] Finally, a decrease in limb tone in one male of each group dosed with IFN-α-2b(E41Q) and in grip strength for two females dosed at 0.2 mg/rat with IFN-α-2b(E41Q) and for one female dosed at 0.4 mg/rat also with IFN-α-2b(E41Q) was observed.

[0790] At necropsy, one mass observed near the trachea was observed in one male dosed with the placebo (vehicle only) and near to the esophagus in one female dosed with IFN-α-2b(E41Q) at 0.4 mg/rat. The male dosed with IFN-α-2b(E41Q) at 0.6 mg/rat and euthanized at D10 showed adhesion between trachea and esophagus and between thymus and heart.

[0791] iii. Body Weight

[0792] No particular effect was observed in males and females treated with both the vehicle and IFN-α-2b(E41Q). A statistically significant decrease in absolute and relative weight of pituitary gland was observed in males with IFN-α-2b(E41Q) at 0.6 mg/rat (−20% and −18% respectively). In females dosed with IFN-α-2b(E41Q) at 0.2 mg/rat, statistically significant increase in relative weight of liver was observed (+11%).

[0793] iv. Body Temperature

[0794] No particular effect was observed in males and females treated with both the vehicle and IFN-α-2b(E41Q) at all doses tested.

[0795] v. Opthalmoscopic Examinations

[0796] No particular abnormality was noticed in males and females treated with both the vehicle and IFN-α-2b(E41Q).

[0797] vi. Blood Analysis

[0798] No particular change related to the treatment was observed in males and females dosed with IFN-α-2b(E41Q) at any dose tested. A statistically significant increase in eosinophils (+144%) was observed at day 8 in males dosed with IFN-α-2b(E41Q) at 0.4 mg/rat.

[0799] vii. Urinary Parameters

[0800] All the parameters were within the range of values usually found in this species for all animals treated with both IFN-α-2b(E41Q) and the vehicle.

[0801] vii. Histopathology

[0802] There were no treatment-related lesions in rats treated with IFN-α-2b(E41Q) at 0.6 mg/rat. Histopathology changes were observed in all treatment groups and included a) edematous inflammation, mural chronic inflammation, hemorrhage in the esophagus, b) edematous inflammation of trachea and c) abscess containing ingesta. These changes were not related to the dose of IFN-α-2b(E41Q) but rather the trauma associated with the mechanical dosing. The greatest esophagus changes were present in the female control group.

[0803] b. Conclusions

[0804] No mortalities and no relevant abnormal findings were observed under these experimental conditions with IFN-α-2b(E41Q) at any of the administered doses. The NOAEL (No Observed Adverse Effect Level) of IFN-α-2b(E41Q) was 0.6 mg/rat when administered by the oral route in male and female rats.

[0805] 3. Single and Repeated Dose Toxicity in Rats by the Intraduodenal (ID) Route

[0806] The toxicity of IFN-α-2b(E41Q) was evaluated in rats after both single and repeated oral administrations. For each group (Groups 1-4), six male rats at 8-weeks (SPF Sprague-Dawley rats, weighing 215.2 g to 263.0 g), with free access to food and water, were used for the experiment. The rats were catheterized into the duodenal lumen 18-24 h before administration of IFN-α-2b(E41Q) or vehicle. The animals were treated under anesthesia according to the procedures below.

[0807] Groups 1 and 2 were assessed for toxicity after a single administration via intraduodenal catheter. Groups 1 received 6 mg/kg of IFN-α-2b(E41Q) in 1 mL (2 mg/mL) and Group 2 received 1 mL of vehicle only as a control. A daily clinical examination and weighing were performed in order to detect any signs of toxicity until day 7. At day 7, the animals were euthanized and the intestine prepared for histopathologic analysis.

[0808] Groups 3 and 4 were assessed for toxicity after repeated administrations daily for seven days via intraduodenal catheter. Groups 3 received 6 mg/kg of IFN-α-2b(E41Q) in 1 mL (2 mg/mL) each day for seven days and Group 4 received 1 mL of vehicle only as a control daily for seven days. A daily clinical examination and weighing were performed in order to detect any signs of toxicity until day 10. At day 10, the animals were euthanized and the intestine prepared for histopathologic analysis.

[0809] No animals died during the observation period. Slightly ruffled fur was observed in one animal. The body weights of the remaining animals were within the range commonly recorded for this strain and age. No abnormal clinical signs were observed.

[0810] Analysis of the animals showed evidence of localized effects likely associated with the route of administration and presumably due to mechanical, traumatic disruption (catheterization) and resultant inflammation. These effects were separated from more widespread effects on the mucosa, which more likely is due to test article toxicity. For example, upon histologic examination, all the specimens (Groups 1, 2, 3 and 4) except one rat (rat no. 1, group 4) had focal disruption/inflammation of the duodenal wall, usually accompanied by mild local peritonitis. These were not interpreted as evidence of product toxicity but rather an indication of mechanical trauma resulting from the gavage process.

[0811] Most specimens (Groups 1, 2, 3 and 4) had minimal fusion of villi, often fused at the tips. In addition, most specimens had a minimal increase in leukocytes (lymphocytes and plasma cells) in the lamina propria of the villi. Fused villi also can occasionally be observed in normal animals. Increased leukocytes in the lamina propria must also be interpreted cautiously, as some leukocytes are normally present.

[0812] Thus, due to the frequent transmural injury observed in all groups, including granulomatous inflammation and mild peritonitis in the duodenum, the fusion of the villi and leukocytic infiltration, administration of IFN-α-2b(E41Q) by intraduodenal administration at the tested doses and schedules was not considered to be toxic.

### B. Cynomolgus Monkeys

[0813] 1. 2-Week Oral Toxicity Study in Cynomolgus Monkeys (Macaca fascicularis) by the Oral Route

[0814] The study involved assessment of four groups of monkeys following oral administration daily with various doses of IFN-α-2b(E41Q). A total of twenty-four Cynomolgus monkeys (Macaca fascicularis) at 24-36 months of age weighing 1.8-2.8 kg (twelve males and twelve females, divided equally among the groups (three animals/sex/group)) were used in the study. The four treatment groups are set forth in Table 83 below:

TABLE 83
Toxicology Treatment Groups

| | | No. of | |
|---|---|---|---|
| | | mice/group | |
| Group (IFN-α-2b(E41Q) dose) | | Male | Female |
| 1. | vehicle alone (four enteric-coated placebo tablets) | 3 | 3 |
| 2. | 0.6 mg/monkey (0.26 mg/kg; one 600 mg IFN-α- | 3 | 3 |
| | 2b(E41Q) enteric-coated tablet + three | | |
| | enteric-coated placebo tablets) | | |
| 3. | 1.2 mg/monkey (0.52 mg/kg; two 600 mg IFN-α- | 3 | 3 |
| | 2b(E41Q) enteric-coated tablets + two | | |
| | enteric-coated placebo tablets) | | |
| 4. | 2.4 mg/monkey (1.04 mg/kg; four 0.6 mg IFN-α- | 3 | 3 |
| | 2b(E41Q) enteric-coated tablets) | | |

[0815] The animals were dosed daily for two consecutive weeks by oral administration of 4 enteric-coated tablets as indicated above for each group. Animals were observed twice a day for mortality and clinical signs. They were weighed once a week during the acclimatization period and on treatment days 1, 8, and 14 and before sacrifice. Body temperature was recorded before administrations 1, 7, 13 and also at 0.5, 1, 2, 4 h after treatment. Opthalmoscopic examinations and blood analyses were performed at pre-dose and at week 2 of the administration period. Hematology, clinical biochemistry and urinalysis examinations were conducted prior to the first dose and at week 2. At the end of the treatment period, a full necropsy and a histopathologic examination were conducted on all animals.

[0816] No mortalities, no relevant clinical signs, no ocular alteration, no variations in body weight or temperature and no microscopic lesions were noted during and at the end of the entire study period for all animals. In addition, blood analysis and urinary analyses did not show any relevant differences among the groups. There were no significant histopathologic alterations that distinguished controls from treated animals.

[0817] In addition to toxicity assessment, blood samples were taken prior to the first dose and after administration at day 1, day 6 and day 13 for immunogenicity studies. Methods and results are reported separately in Example 20.A.3. Blood samples for the determination of the plasma levels of IFN-α-2b(E41Q) (toxicokinetics) were taken at days corresponding to administration days 1 and day 14. Methods and results are reported separately in Example 12.

[0818] 2. Comparison of Toxicity of IFN-α-2b(E41Q) to Commercial IFN-Alpha—Intron A® Interferon and Pegasys® Interferon Following Subcutaneous Administration

[0819] Toxicity analysis was performed on Cynomolgus monkeys (Macaca fascicularis) receiving various doses of IFN-α-2b(E41Q), Intron A® interferon, Pegasys® interferon and native IFN-α-2b following administration by subcutaneous route as described in Example 14. In the studies in Example 14, numerous safety parameters were evaluated, including general safety (e.g., mortality, body weight, food consumption, rectal temperature); hematology (e.g., erythrocyte, hemoglobin, mean cell volume, packed cell volume, mean cell hemoglobin concentration, mean cell hemoglobin, thrombocytes, leucocytes, differential white cell count, prothrombin time, fibrinogen, activated partial thromboplastin time); blood chemistry (e.g., sodium, potassium, chloride, calcium, inorganic phosphorus, glucose, urea, creatinine, total bilirubin, cholesterol, triglycerides, total proteins, albumin, albumin/globulin ratio, alkaline phosphatase, aspartate aminotransferase, alanine aminotransferase, creatine kinase, lactate dehydrogenase, g-glutamyl transferase); and clinical pathology (e.g., organ weight and status at necropsy). There were no treatment-related deaths or premature sacrifices during the study. There were no treatment-related clinical signs and no changes in body weight in any group during the study. Food consumption also was unaffected during the treatment period.

[0820] The results of the analysis showed only a slight increase in body temperature (range: −0.3 to +2.1° C.) within 2 h after each treatment, which did not appear to be dose-related and were of similar amplitude across the different treatment groups. Hematological and blood parameters were not affected by the treatment in any group during the study. There were no treatment-related modifications of any urinalysis parameter in any group. Also, there were no treatment-related effects noted in organ weights, nor abnormal findings related to treatment in the macroscopic post-mortem examination.

[0821] A low to moderate urinary levels of IFN-α were generally detected during part 1 of the study (see Example 14 for study details), except for one female administered with native IFN-α that showed a marked level of IFN-α in the urine. During Part 2 of the study (see Example 14 for study details), the only animals showing relevant levels of IFN-α in the urine were observed in the two animals given Pegasys® interferon.

[0822] 3. 13-Week Dose Toxicity Study in Cynomolgus Monkeys (Macaca fascicularis) by the Subcutaneous (SC) Route

[0823] The study involved assessment of four groups of monkeys following subcutaneous injections twice a week (at days 1 and 5 of each week) for thirteen weeks with various doses of IFN-α-2b(E41Q) (0.5 mL/kg body weight) in physiological saline. A total of twenty-four Cynomolgus monkeys (Macaca fascicularis) at 42-60 months of age weighing 2.1-3.6 kg (twelve males and twelve females, divided equally among the groups (three animals/sex/group)) were used in the study. Injections were given alternately on four previously shaved areas on the back, two on each side of the mediodorsal line, for a total of twenty-six administrations. The four treatment groups are set forth in Table 84 below:

TABLE 84
Treatment Groups

No. of
mice/group

| Group (IFN-α-2b(E41Q) dose) | Male | Female |
|---|---|---|
| 1. vehicle alone | 3 | 3 |
| 2. 0.14 MIU/kg (0.47 μg/kg) | 3 | 3 |
| 3. 0.42 MIU/kg (1.40 μg/kg) | 3 | 3 |
| 4. 1.26 MIU/kg (4.20 μg/kg) | 3 | 3 |

[0824] Animals were observed daily for mortality and clinical signs. They were weighed twice a week and once before sacrifice. Body temperature was recorded before and after administrations 1, 3, 7, 12 and 26. Opthalmoscopic examinations and blood analyses were performed at pre-dose and at weeks 6 and 13 of the administration period. Urinalysis examinations were conducted at weeks 6 and 13. At the end of the treatment period, a full necropsy and a histopathologic examination were conducted on all animals.

[0825] a. Results

[0826] i. Toxicity Analysis

[0827] No unscheduled deaths or mortalities resulted from the treatments. There were no differences in the clinical signs or mean body-weight gain between treatment groups. There were no relevant differences in the mean body temperature values between groups. No ocular alterations were observed. Also, the results of the studies showed no differences in urinary parameters between groups, and no relevant differences in histopathology. There were no macroscopic alterations or variation in organ weight.

[0828] ii. Toxicokinetics

[0829] Blood samples also were taken for the determination of the plasma levels of IFN-α-2b(E41Q) (toxicokinetics) at days corresponding to administrations 1 (day 1), 8 (day 26) and 26 (day 89). The results showed no differences in hematological and haemostatic parameters between groups. A very slight increase in serum globulin levels was observed in females administered with 0.42 MIU/kg or 1.26 MIU/kg IFN-α-2b(E41Q), with no variations in the physical conditions nor in the behavior of the animals. A dose of 1.26 MIU/kg can be considered as the no observed effect level (NOEL).

[0830] Toxicokinetics: Twice a week SC injection of IFN-α-2b(E41Q) at doses of 0.14, 0.42 and 1.26 MIU/Kg in a repeat-dose toxicity study was associated with linear, dose-related increases in Cₘₐₓ and AUC after the first administration. After 13 weeks of treatment, the detection of IFN-α-2b(E41Q) serum levels was impeded by the development of neutralizing antibodies in some animals.

[0831] iii. Immunogenicity

[0832] Blood samples also were taken for immunogenicity studies (assessment of total and neutralizing antibodies) at pre-dose (day 1) and after administrations 4 (day 12), 8 (day 26), 12 (day 40) and 26 (day 89). The results show that across all dose groups, neutralizing antibodies appeared in 6-18 animals by 40 days and in 14-18 animals by 89 days. The appearance was later and at lower levels in the low dose group, and was earlier and highest in the mid-dose group.

[0833] Both total and binding anti-IFN-α antibodies increased with duration of treatment and dose administered. The results show that up to 26 days, nearly no antibodies were evidenced in any dose group, but by day 40, antibodies had appeared in 3-5 animals in each dose group (n=6). The intermediate dose (0.42 MIU/kg) appeared to elicit more antibodies than the highest dose (1.26 MIU/kg). Thus, antibody interference must be considered in toxicology studies where the treatment duration is longer than one month.

[0834] In conclusion, IFN-α-2b(E41Q) was well tolerated by monkeys when injected SC at repeated doses up to 1.26 MIU/kg for 13 weeks twice a week.

### C. Mice

[0835] 1. Acute Toxicity in Mice by the Intravenous (IV) Route

[0836] The acute toxicity of IFN-α-2b(E41Q) was evaluated in mice after a single IV injection of 50 MIU/kg (5 mL/kg) of IFN-α-2b(E41Q) in 0.9% sodium chloride by administration into the caudal vein. Six female mice (HanRcc: NMRI-SPF) age 7-8 weeks and weighing 26.1-30.1 g, with free access to food and water, were used for the experiment. Mortality, clinical signs and body weight were monitored for 14 days. At the end of the observation period, all animals were sacrificed by intraperitoneal (IP) injection of Vetanarcol (dose ≧2.0 mL/kg) and post-mortem examinations were performed.

[0837] No animals died during the observation period and no abnormal clinical signs or local reactions were observed. A slight increase in body weight (4.6%) was observed in one animal between day 8 and day 15, whereas no significant increase in body weight was observed in another animal throughout the entire observation period. The body weight of the remaining animals was within the range commonly recorded for this strain and age. No macroscopic findings were recorded at necropsy.

[0838] The results show that IFN-α-2b(E41Q) was well tolerated in mice at the tested dose of 50 MIU/kg. The median lethal dose (LD₅₀) of IFN-α-2b(E41Q) after IV administration to female mice observed over a period of 14 days was greater than 50 MIU/kg of body weight.

[0839] 2. Acute Toxicity in Mice by the Subcutaneous (SC) Route

[0840] The acute toxicity of IFN-α-2b(E41Q) was evaluated in mice after a single SC injection of 50 MIU/kg (5 mL/kg body weight) of IFN-α-2b(E41Q) in 0.9% sodium chloride into the neck region. Six female mice (HanRcc: NMRI-SPF) age 7-8 weeks and weighing 26.1-30.1 g, with free access to food and water, were used for the experiment. Mortality, clinical signs and body weight were monitored for 14 days. At the end of the observation period, all animals were sacrificed by intraperitoneal (IP) injection of Vetanarcol (dose ≧2.0 mL/kg) and post-mortem examinations were performed.

[0841] No animals died during the observation period. Slightly ruffled fur was observed in one animal. A slight decrease in body weight (2.4 and 1.8%) was observed in two animals during the course of the study. The body weight of the remaining animals was within the range commonly recorded for this strain and age. No macroscopic findings were recorded at necropsy.

[0842] In conclusion, IFN-α-2b(E41Q) was well tolerated at the tested dose of 50 MIU/kg. The median lethal dose of IFN-α-2b(E41Q) after SC administration to female mice observed over a period of 14 days (LD₅₀) was greater than 50 MIU/kg of body weight.

### Example 17

### Genotoxicity (Mutagenicity) Studies

[0843] A. Salmonella typhimurium Reverse Mutation Assay

[0844] The purpose of this assay was to evaluate genotoxicity by measuring the ability of IFN-α-2b(E41Q) to induce reverse mutations at selected loci. The bacterial strains used in the assay were 5 strains of Salmonella typhimurium (TA1535, TA1537, TA98, TA100 and TA102), which have a unique mutation that has turned off histidine biosynthesis. As a result of this mutation, the bacteria require exogenous histidine to survive and will starve to death if grown without histidine. The assay relies on the ability of bacteria to undergo a reverse mutation turning the essential gene back on thereby permitting the cell to grow in the absence of histidine. Each bacterial strain was created by a specific mutation. For example, the strains used were constructed to differentiate between base pair (TA 1535, TA10 and TA102) and frameshift (TA1537 and TA98) mutations. Thus, the experiment was performed to assess the potential of IFN-α-2b(E41Q) to induce gene mutation in these 5 strains of Salmonella typhimurium (TA1535, TA1537, TA98, TA100 and TA102).

[0845] The assay was performed in two independent experiments both with and without S9 mix, which is a cofactor-supplemented post-mitochondrial mix prepared from the livers of rodents and which functions as a metabolic activation system in this assay. In each of the experiments, various concentrations of IFN-α-2b(E41Q) (batch number # IFN 003-05) were tested in triplicate at concentrations ranging from 0.0390625; 0.078125; 0.15625; 0.3125; 0.625; 1.25; 2.5 and 5 μg/plate. Controls also were tested in triplicate.

[0846] Bacteria were plated on agar plates in the presence or absence of the indicated doses of IFN-α-2b(E41Q), with or without the S9 mix. The results showed normal background growth of bacteria on all plates containing concentrations of IFN-α-2b(E41Q) up to 5 μg/plate, with and without S9 mix, in all strains used. No toxic effects, evident as a reduction in the number of revertants, occurred in the test groups with and without metabolic activation.

[0847] No substantial increase in revertant colony numbers of any of the five tester strains was observed after treatment with IFN-α-2b(E41Q) at any dose level, neither in the presence nor absence of metabolic activation (S9 mix). There also was no tendency of higher mutation rates with increasing concentrations in the range below the generally acknowledged border of biological relevance.

[0848] During the described mutagenicity test and under the experimental conditions reported, the test item did not induce gene mutations by base pair changes or frameshifts in the genome of the strains used. Therefore, IFN-α-2b(E41Q) is considered to be non-mutagenic in this Salmonella typhimurium reverse mutation assay.

### B. Mouse Micronucleus Assay

[0849] The mutagenic potential of IFN-α-2b(E41Q) was determined by its ability to induce micronuclei in polychromatic erythrocytes (PCE) in the bone marrow of mice. Seventy-two NMRI mice at 9-11 weeks old (thirty-six males, thirty-six females; weight: mean values 33.3 g for males and 34.7 for females), were divided in six treatment groups (six males and six females per group). The mice received a single oral administrations of IFN-α-2b(E41Q) (in 0.9% NaCl; 10 mL/kg body weight) at the various doses, or controls as follows:
[0850] Group 1: Vehicle (negative control, 0.9% NaCl)
[0851] Group 2: IFN-α-2b(E41Q) 1.25 MIU/kg body weight (bone marrow collection after 24 h)
[0852] Group 3: IFN-α-2b(E41Q) 2.5 MIU/kg body weight (bone marrow collection after 24 h)
[0853] Group 4: IFN-α-2b(E41Q) 5.0 MIU/kg body weight (bone marrow collection after 24 h)
[0854] Group 5: IFN-α-2b(E41Q) 5.0 MIU/kg body weight (bone marrow collection after 48 h)
[0855] Group 6: Cyclophosphamide (positive control) 40 mg/kg body weight (bone marrow collection after 24 h).

[0856] Bone marrow cells were collected at the indicated times for micronuclei analysis. At least 2000 polychromatic erythrocytes (PCEs) per animal were scored for micronuclei. In order to determine a cytotoxic effect due to the treatment, the ratio between polychromatic and total erythrocytes was determined in the same sample and reported as the number of PCEs per 2000 erythrocytes. After treatment with IFN-α-2b(E41Q) at the doses and times indicated above, the number of PCEs was not substantially decreased as compared to the mean value of PCEs of the vehicle control, thus indicating that IFN-α-2b(E41Q) did not exert any cytotoxic effects in the bone marrow.

[0857] In comparison to the corresponding vehicle controls, there was no biologically relevant or statistically significant enhancement in the frequency of the detected micronuclei at any preparation interval after administration of IFN-α-2b(E41Q) at any dose level used. Whereas oral administration of the positive control to mice (40 mg/kg body weight cyclophosphamide) resulted in a substantial increase of induced micronucleus frequency, IFN-α-2b(E41Q) did not induce micronuclei in the experimental condition described for any dose tested, and can therefore be considered not mutagenic.

### Example 18

### Safety Pharmacology

### A. Modified Irwin Screen Test in Mice

[0858] An observational screening test (modified Irwin's test) was performed to determine if administration of IFN-α-2b(E41Q) induced any behavioral changes in treated animals. Eighteen male HanRcc: NMRI mice at 5 weeks of age and weighing 30-35 g (six animals/group) were assessed for behavioral changes immediately after and at 0.5, 1, 2 and 4 h after a single subcutaneous (SC) injection in the neck region of IFN-α-2b(E41Q) (5 mL/Kg body weight) at dosages of 1) 0.05 MIU/kg body weight (0.167 μg/kg), 2) 0.15 MIU/kg body weight (0.50 μg/kg) and 3) 0.45 MIU/kg body weight (1.50 μg/kg). A control group of six animals was treated with vehicle only (physiologic saline). Body weights were recorded before dosing.

[0859] The mice were observed for responses in their home cage as well as for responses to a new environment (arena) and handling. Alertness, abnormal body carriage (hunched posture), abnormal gait (walking lower than its limbs), exploratory activity, pain response, aggression, vocalization increases were recorded before dosing, immediately after dosing, and respectively at 0.5, 1, 2, and 4 h after dosing. Where similar behaviors were observed, and with similar frequency, before and after IFN-α-2b(E41Q) dosing or in the vehicle control group such behaviors were considered not to be related to the administration of IFN-α-2b(E41Q).

[0860] After treatment with IFN-α-2b(E41Q), the maximum increased pain response and alertness was observed immediately and 0.5 h after dosing in the 0.45 MIU/kg group, in two out of six animals. Additionally, an abnormal body carriage, demonstrated as a hunched posture, was recorded immediately after dosing and lasted for up to 2 h after dosing. None of these findings reached statistical significance and were considered not to be related to IFN-α-2b(E41Q).

[0861] A single SC injection of IFN-α-2b(E41Q) at doses up to 0.15 MIU/kg body weight (0.50 μg/kg) was without significant effects on the general behavior using a modified Irwin screen test in male NMRI mice. After treatment with 0.45 MIU/kg body weight (1.50 μg/kg) of IFN-α-2b(E41Q), there was some evidence of increased alertness, abnormal body carriage and an increased pain response but these behaviors were not significant and were not with sufficient frequency to be statistically significant.

B. Effect on HERG-1 Tail Currents Recorded from Stably Transfected HEK 293 Cells

[0862] The purpose of this study was to investigate the potential for IFN-α-2b(E41Q) to block the HERG-1 potassium channels, which is associated with ventricular arrhythimias. HERG-1 tail currents were recorded in transfected HEK 293 cells stably expressing HERG-1 potassium channels. The effects of IFN-α-2b(E41Q) at concentration levels of 100, 1000 and 10000 IU/mL were investigated using the whole-cell patch clamp technique at room temperature. Each concentration was tested in at least four isolated cells from different culture dishes in order to avoid contamination. At least four separate cells were treated with vehicle alone (137 mmol NaCl/1, 4 mmol/l KCl, 1.8 mmol/l CaCl₂, 1 mmol/l MgCl, 10 mmol/l HEPES (N-2-hydroxyethylpiperazine-N′-2-ethanesulfonic acid), 10 mmol/l D-Glucose) as a negative control. Two additional cells were treated with 100 nM of the selective I_{Kr} blocker E-4031, which is a known blocker of HERG-1 channels, in order to assure accuracy of the method.

[0863] This study showed that at the concentrations of 100, 1000 and 10000 IU/mL, IFN-α-2b(E41Q) had no effect on HERG-1 tail currents. Thus, IFN-α-2b(E41Q) does not interact with the HERG-1 channel at the concentration tested and under the conditions described, and should have no effect on ventricular repolarization.

### C. Telemetry Study in Cynomolgus Monkeys

[0864] Five male Cynomolgus monkeys (Macaca fasciculata) at 5-7 years of age (sexually mature), weighing 4-6.1 kg, were anesthetized with ketamine-HCl at 9 mg/kg and diazepam at 0.5 mg/kg via intramuscular (IM) injection. Surgical level anesthesia was induced and maintained by continuous ketamine intravenous (IV) drip (approx. 50-70 mg/kg/h as 1% solution) into the left vena cephalica during the entire cardiovascular recording procedure. Following anesthesia administration, the animals were allowed to rest for 15 minutes to stabilize circulatory functions. They were then treated first with the vehicle (0.9% NaCl solution) and then with increasing dose levels of IFN-α-2b(E41Q) (2 mL/kg body weight) [0.14 MIU/kg (0.47 μg/kg), 0.42 MIU/kg (1.40 μg/kg), and 1.26 MIU/kg (4.20 μg/kg)], administered by subcutaneous (SC) bolus injections into the dorsal region at intervals of 90 minutes (60 minute observation period and 30 minute stabilization period). Before the first administration and at further suitable times after the administration, noradrenaline (2 μg/kg) and isoproterenol (2 μg/kg) were administered intravenously, in order to confirm that the cardiovascular reactions to noradrenaline and isoproterenol were influenced by administration of IFN-α-2b(E41Q) into the animals.

[0865] The animals were assessed for the following parameters: peripheral arterial blood pressure (systolic, diastolic and mean blood pressures), pulmonary arterial blood pressure, heart rate, electrocardiography, cardiac output and cardiac stroke volume, left ventricular pressure, central venous pressure, respiration (respiration rate and minute volume) and blood gas analysis.

[0866] The data showed no evidence of any effect on the systolic, diastolic and mean arterial blood pressure after SC administration of IFN-α-2b(E41Q) at doses of 0.14 MIU/kg and 0.42 MIU/kg. Under the test conditions, a marginal, though not significant (p≦0.01), decrease of the systolic, diastolic and the mean arterial blood pressure was noted 30 and 60 minutes after the SC administration of IFN-α-2b(E41Q) at a dose of 1.26 MIU/kg. Since hypotension is a well-known effect of interferons, this reduction is considered as being related to IFN-α-2b(E41Q). No influence was noted on any of the following cardiovascular parameters: systolic and diastolic pulmonary arterial blood pressure, capillary blood pressure (wedge pressure), heart rate, QRS-interval, QT-interval, QTc-interval, P-interval, cardiac output, stroke volume, systolic left ventricular pressure, dp/dTmax, central venous pressure as well as respiratory rate and volume, blood pH value and blood gases. No evidence was noted for a prolongation of the QT-interval. The cardiovascular reactions to noradrenaline and isoproterenol were not influenced.

[0867] IFN-α-2b(E41Q) did not exert any statistically significant influence on any of the cardiovascular and respiratory parameters which were taken into consideration. A statistically non-significant decrease in arterial blood pressure (systolic, diastolic and mean) was attributed to IFN-α-2b(E41Q), since hypotension is a well known effect of interferon.

### Example 19

### Immunogenicity Prediction

[0868] Both in the initial selection of candidate LEAD polypeptides and in the development program itself, the immunogenic potential of IFN-α-2b(E41Q) has been examined. This has included an in silico analysis of B- and T-cell epitopes for IFN-α-2b(E41Q) compared to those for native IFN-α as well as a determination of the presence of neutralizing and total antibodies to IFN-α as described in Example 20 below.

[0869] The prediction of B-cell and T-cell epitope changes caused by the single amino acid replacement E41Q in IFN-α-2b was performed in silico using two algorithms: B cell epitope algorithm (BCEPRED) and T cell epitope algorithm (SYFPEITHI), respectively.

### A. B-Cell Epitope Prediction

[0870] The BCEPRED algorithm (Saha S. et al., in G. Nicosia, V. Cutello, P. J. Bentley and J. Timis (Eds.) ICARIS 2004, LNCS 3239, 197-204, Springer, 2004) is used to predict B-cell epitope regions in an antigen sequence. This prediction relies on physico-chemical properties (Ronni et al., J. Immunol., 1993; 150:1715-1726). The BCEPRED algorithm can predict continuous B-cell epitopes with 58.7% accuracy using Flexibility, Hydrophilicity, Polarity, and Surface properties combined at a threshold of 2.38.

[0871] This algorithm plots the residue properties along the protein backbone. The peak of the amino acid residue segment above the threshold value (default is 2.38) is considered as a predicted B-cell epitope. No difference in B-cell epitope predictions was observed between IFN-α-2b(E41Q) and native IFN-α.

### B. T-Cell Epitope Prediction

[0872] The SYFPEITHI algorithm was used to predict the ligation strength to a defined HLA type for a sequence of amino acids (Rammensee et al. (1999) Immunogenetics, 50:213-9; www.syfpeithi.de). The algorithm is based on the book “MHC Ligands and Peptide Motifs” by H. G. Rammensee, J. Bachmann and S. Stevanovic. The probability of being processed and presented is given in order to predict T-cell epitopes.

[0873] Using the algorithm, no evidence for new T-cell epitope was observed with IFN-α-2b(E41Q) compared to native IFN-α. In addition, four regions, beginning at amino acid positions 34, 38, 40 and 41 on native IFN-α-2b, and which were predicted to be T-cell epitopes, showed a processing probability score higher on native IFN-α-2b than the corresponding region on IFN-α-2b(E41Q). The predicted T-cell epitope in those regions and the predicted scores for native IFN-α-2b and IFN-α-2b(E41Q) mutation are shown in Table 85 below. The amino acid residue corresponding to the E41Q mutation is indicated in bold.

TABLE 85

Predicted T-cell epitopes for IFN-α-2b(E41Q)

| | | | | | |
|---|---|---|---|---|---|
| | | | | IFN-α- | |
| | | SEQ | Native | 2b | % of re- |
| Posi- | T-cell | ID | IFN-α | (E41Q) | duction of |
| tion | epitope | NO: | score | score | immunogenicity |

| | | | | | |
|---|---|---|---|---|---|
| 34-43 | HDFGFPQQEF | 2158 | 12 | 10 | 17 |
| 38-47 | FPQQEFGNQF | 2159 | 11 | 10 | 17 |
| 40-49 | QQEFGNQFQK | 2160 | 11 | 1 | 99 |
| 41-50 | QEFGNQFQKA | 2161 | 15 | 5 | 66 |

[0874] All B-cell and T-cell prediction data supported the fact that IFN-α-2b(E41Q) did not have a larger immunogenic potential than native IFN-α.

### Example 20

### Analysis of Immunogenicity in Pharmacokinetic and Pharmacodynamic Animal Model Studies

[0875] Animals from the pharmacokinetic and toxicity studies described in Examples 10, 12, 14, 15, and 16 also were assessed for the presence of total and neutralizing antibodies as an assessment of the immunogenicity of IFN-α-2b(E41Q). The results below show 1) determination of neutralizing and binding antibodies for IFN-α-2b(E41Q), native IFN-α, Intron A® interferon and Pegasys® interferon in a PK/PD/clinical safety ascending dose study in monkeys; 2) determination of neutralizing and binding antibodies in a 13-week repeat dose toxicology study in monkeys; 3) determination of neutralizing and binding antibodies in a 2-week repeat dose toxicity study in monkeys; 4) determination of neutralizing and binding antibodies in a 2-week repeat dose toxicity study in rats; 5) determination of a generation of new epitopes in transgenic mice; and 6) cross-reactivity studies between IFN-α-2b(E41Q) antibodies and native IFN-α.

### A. Monkeys

[0876] 1. Immunogenicity Assessment in Toxicity Study of IFN-α-2b(E41Q), Commercial IFN-Alpha—Intron A® and Pegasys® Following Subcutaneous Administration

[0877] In the toxicity study described in Example 14 and Example 16.B.2 above, groups of 1 male and 1 female monkey were given escalating single doses of IFN-α-2b(E41Q), native IFN-α, Intron A® interferon and Pegasys® interferon. Blood samples were taken for preliminary examination on specified days after administration for assessment of antibody formation.

[0878] a. Measurement of Neutralizing Antibodies

[0879] The quantification of neutralizing antibodies was performed according to Kawade's assay (Kawade et al., J. Interferon Research, 1987; Grossberg et al., J. Interferon Cytokines Research; 2001; Grossberg et al., Biotherapy; 1997; Kawade Y., J. Interferon Research, 1980; 1:61-70; Kawade et al., J. Immunological Methods, 2003). Briefly, 10 LU (Laboratory Units) of native IFN-α or IFN-α-2b(E41Q) were added to 12 serial (2-fold) dilutions of monkey blood samples that had been collected on specified days after administration of protein. After incubation for 4 h, the mixtures were placed on EMCV infected HeLa cells to measure the remaining antiviral activity as described in Example 1. Neutralizing antibody levels were determined as 10-fold reducing unit per mL of monkey serum (TRU/mL) corresponding to the dilution of monkey serum necessary to obtain 50% of total activity of IFN-α-2b(E41Q) and native IFN-α not treated with serum.

[0880] The results are depicted in Tables 86 and 87 below. Low levels of IFN-α-neutralizing antibodies were observed after the end of the dosing period in all treated groups except for animals given Intron A® interferon. During Step 2 (after the washing period), IFN-α-neutralizing antibody levels were detected from the beginning of the treatment at similar or higher levels than those noted during Step 1. No IFN-α neutralizing antibodies were detected in animals given Intron A® interferon as well as in naïve animals given Pegasys® interferon and IFN-α-2b(E41Q).

[0881] Levels of neutralizing anti-IFN-α antibodies of IFN-α-2b(E41Q) (TRU/mL) obtained in Part 1 (Steps 1 and 2) compared to native IFN-α and Intron A® interferon are shown in Table 86 below.

TABLE 86
Neutralizing antibodies (part 1)

| | Native IFN-α | | Intron A ® | | IFN-α-2b(E41Q) | |
|---|---|---|---|---|---|---|
| | (TRU/mL) | | (TRU/mL) | | (TRU/mL) | |
| | M | F | M | F | M | F |
| Day − 3 | ND | ND | ND | ND | ND | ND |

Step 1: injection at days 1, 4, 8 and 12 with doses of 0.03, 0.3, 1.0 and 3.0
mg/kg for native IFN-α and IFN-α-2b(E41Q); 0.0, 0.0, 0.03 and
0.3 mg/kg for Intron A ® interferon

| | | | | | | |
|---|---|---|---|---|---|---|
| Day 16 | ND | ND | ND | ND | ND | ND |
| Day 21 | ND | ND | ND | ND | ND | ND |
| Day 28 | 125 | 111 | 14 | ND | 27 | ND |
| Day 51 | 50 | 43 | ND | ND | 67 | 29 |

Step 2: injection at days 66, 72 and 78 with doses of 0.03, 0.03 and 0.3
mg/kg; non-naïve animals

| | | | | | | |
|---|---|---|---|---|---|---|
| Day 86 | 83 | 40 | ND | ND | 37 | 125 |
| Day 93 | 83 | 50 | ND | ND | 29 | 26 |
| Day | 1667 | 111 | ND | ND | 100 | 26 |
| 100 | | | | | | |

TRU = Ten-fold Reducing Units;
ND = Not Detectable

[0882] Levels of neutralizing anti-IFN-α antibodies of IFN-α-2b(E41Q) (TRU/mL) obtained in Part 2 compared to Pegasys® interferon are shown in Table 87 below.

TABLE 87
Neutralizing antibodies (part 2)

| | |
|---|---|
| | IFN-α- |
| Pegasys ® | 2b(E41Q) |
| (TRU/mL) | (TRU/mL) |

| | M | F | M | F |
|---|---|---|---|---|
| Day - 8 | ND | ND | ND | ND |

Injections at days 1, 7 and 13 with doses of 0.03, 0.03 and 0.3
mg/kg for IFN-α-2b(E41Q) and 0.0, 0.3 and 0.3 mg/kg for
Pegasys ® interferon

| | | | | |
|---|---|---|---|---|
| Day 21 | ND | ND | ND | ND |
| Day 28 | ND | ND | ND | ND |
| Day 35 | ND | ND | ND | ND |

TRU = Ten-fold Reducing Units;
ND = Not Detectable

[0883] b. Quantitation of Total Anti-IFN-α Antibodies

[0884] Quantitative determination of total anti-IFN-α antibodies was determined in monkeys administered with various IFN-α proteins as described in Example 14. The antibody levels in were assayed using human anti-IFN-α Bender Medsystems Immunoassay Kit (BMS217-Tebu, France). Briefly, monkey plasma was collected at specified times after administration as indicated in Example 14, and the plasma samples were diluted 5 times according to the manufacturer's protocol. The optical density (OD) at 450 nm in the samples was measured using a spectrophotometer. The Results are expressed in ng/mL. The results are depicted in Tables 88 and 89 below. No antibodies against IFN-α were observed before the first administration under any of the conditions or dosing regimes tested. During Part 1, Step 1, an elevated level of total antibodies against IFN-α was noted in all treated animals at the end of the treatment period, except in animals given Intron A® interferon. The lack of total antibodies detected with Intron A® interferon likely was because the highest dose for this compound was 10-fold lower compared to the other groups.

[0885] During Step 2 antibodies were detected at similar or higher levels than those noted during Step 1. Low to moderate total antibody levels were noted in animals given Intron A® interferon, whereas in Part 2 high levels were detected in naïve animals given Pegasys® interferon and IFN-α-2b(E41Q) but at a lesser degree than in non naïve animals from Step 2 as shown in Tables 88-89 below.

[0886] Titers of total anti-IFN-α antibodies of IFN-α-2b(E41Q) (ng/mL) obtained in Part 1 (Steps 1 and 2) compared to native IFN-α and Intron A® interferon are shown in Table 88 below:

TABLE 88
Total antibodies (part 1)
Determination of total anti-IFN-α antibody concentration
(Bender Medsystem Immunoassay)

| | Native IFN-α | | Intron A ® | | IFN-α-2b(E41Q) | |
|---|---|---|---|---|---|---|
| | (ng/mL) | | (ng/mL) | | (ng/mL) | |
| | M | F | M | F | M | F |
| Day − 3 | 0.0 | 0.0 | 0.0 | 0.0 | 8.9 | 0.0 |

Step 1: injections performed at days 1, 4, 8 and 12 with doses of 0.03, 0.3,
1.0 and 3.0 mg/kg for native IFN-α and IFN-α-2b(E41Q); 0.0, 0.0, 0.03
and 0.3 mg/kg for Intron A ® interferon

| | | | | | | |
|---|---|---|---|---|---|---|
| Day 16 | 3334 | 2314 | 0.0 | 0.0 | 284 | 2221 |
| Day 21 | 2300 | 1886 | 5.3 | 136 | 1113 | 1879 |
| Day 28 | 1787 | 1915 | 0.0 | 48 | 1696 | 1364 |
| Day 51 | 2101 | 722 | 14 | 98 | 1525 | 1587 |

Step 2: injections at days 1, 7 and 13 with doses of 0.03, 0.03 and
0.3 mg/kg; non-naïve animals

| | | | | | | |
|---|---|---|---|---|---|---|
| Day 21 | 3270 | 2726 | 16 | 539 | 1646 | 1448 |
| Day 28 | 2875 | 3470 | 23 | 495 | 2171 | 1670 |
| Day 35 | 3324 | 2688 | 16 | 336 | 2338 | 1818 |

[0887] Levels of total anti-IFN-α antibodies of IFN-α-2b(E41Q) (ng/mL) obtained in Part 2 compared to Pegasys® interferon interferon are shown in Table 89 below:

TABLE 89
Total antibodies (part 2)

| | |
|---|---|
| | IFN-α- |
| Pegasys ® | 2b(E41Q) |
| (ng/mL) | (ng/mL) |

| | M | F | M | F |
|---|---|---|---|---|
| Day - 8 | 0.0 | 0.0 | 0.0 | 0.0 |

Injections at days 1, 7 and 13 with doses of 0.03, 0.03
and 0.3 mg/kg for IFN-α-2b(E41Q) and 0.0, 0.3 and
0.3 mg/kg for Pegasys ® interferon

| | | | | |
|---|---|---|---|---|
| Day 21 | 1268 | 308 | 531 | 751 |
| Day 28 | 1881 | 2049 | 301 | 632 |
| Day 35 | 1872 | 2073 | 277 | 780 |

[0888] No relevant differences of total and neutralizing antibody levels were noted between IFN-α-2b(E41Q), native IFN-α and Pegasys® interferon. Comparisons were made with Intron A® interfere since the highest dose for Intron A® interferon was 10-fold lower.

[0889] 2. 13-Week Repeated Dose Toxicity Study in Cynomolgus Monkeys (Macaca fascicularis) by the SC Route—Total and Neutralizing Antibodies

[0890] During the 13-week toxicology study in monkeys (described in Example 15), IFN-α-2b(E41Q) was administered by subcutaneous (SC) injection for 13 weeks twice a week. Blood samples for immunogenicity studies (assessment of total and neutralizing antibodies) were taken at pre-dose (day 1) and after administrations 4 (day 12), 8 (day 26), 12 (day 40) and 25 (day 89). Both total and neutralizing anti IFN-α antibodies in monkey serum were measured at study days 1, 12, 26, 40 and 89 days.

[0891] a. Measurement of Neutralizing Antibody

[0892] Quantitative determination of neutralizing antibodies was performed according to the well known Kawade's assay as described in Example 20.A.1.a above, except that incubation was for 1 hour before the mixtures were placed on EMCV infected HeLa cells to measure the remaining antiviral activity as described in Example 1. The neutralizing antibody levels (TRU/mL) were determined as described above.

[0893] The results are depicted in Tables 90(a-c) below. At days 1 and 12, no neutralizing antibodies were detected at any of the doses tested. At day 26, neutralizing antibodies were detected in only two animals, one in the intermediate dose group (0.42 MIU/kg) and one in the high dose group (1.26 MIU/kg), with marginally positive values of 27 TRU/mL and 23 TRU/mL, respectively. At day 40, no neutralizing antibodies were found in animals in the lowest dose group. In the intermediate dose group (0.42 MIU/kg), antibody titers of 240465 TRU/mL were found in four animals. In the high dose group (1.26 MIU/kg), antibody titers of 85386 TRU/mL were found in two animals. At day 89, five animals in the low dose group (0.14 mg/kg) had attained clearly positive levels of neutralizing antibodies with titers of 77348 TRU/mL. In the intermediate dose group (0.42 MIU/kg), four animals reached titers of 5012198 TRU/mL, and in the high dose group, three animals reached titers of 203929 TRU/mL.

TABLE 90a
Dose of 0.14 MIU/kg

TRU/mL

| Day | F16 | F17 | F18 | M4 | M5 | M6 |
|---|---|---|---|---|---|---|
| 1 | Nd | nd | nd | nd | nd | nd |
| 12 | Nd | nd | nd | nd | nd | nd |
| 26 | Nd | nd | nd | nd | nd | nd |
| 40 | Nd | nd | nd | nd | 4 | nd |
| 89 | 150 | 227 | nd | 87 | 348 | 77 |

TABLE 90b
Dose of 0.42 MIU/kg

TRU/mL

| Day | F19 | F20 | F21 | M7 | M8 | M9 |
|---|---|---|---|---|---|---|
| 1 | Nd | nd | nd | nd | nd | nd |
| 12 | Nd | nd | nd | nd | nd | nd |
| 26 | 2 | 3 | nd | nd | 27 | 19 |
| 40 | 240 | 437 | nd | 17 | 465 | 366 |
| 89 | 2052 | 2198 | 18 | 501 | 1779 | 1951 |

TABLE 90c
Dose of 1.26 MIU/kg

TRU/mL

| Day | F22 | F23 | F24 | M10 | M11 | M12 |
|---|---|---|---|---|---|---|
| 1 | nd | nd | nd | nd | nd | nd |
| 12 | nd | nd | nd | nd | nd | nd |
| 26 | nd | nd | 1 | nd | nd | 23 |
| 40 | 14 | nd | 386 | nd | nd | 85 |
| 89 | 203 | 3 | 929 | nd | 73 | 427 |

nd = not detectable
threshold of positivity = neutralizing antibody titer >20 TRU/mL
TRU/mL = ten fold reducing units/mL (values from quantitative neutralization assay)

[0894] b. Quantitation of Total Anti-IFN-α Antibodies

[0895] Quantitative determination of total anti-IFN-α antibodies was determined using human anti-IFN-α Bender Medsystems Immunoassay Kit (BMS217-Tebu, France) (SOP-TST-003/06 rev1) as described in Example 20.A.1.b above. The lower limit of detection of anti-IFN-α antibodies was determined to be 1.38 ng/mL. The calculated overall coefficient of inter-assay variation is 4.1% (determined by the manufacturer).

[0896] The results are depicted in Tables 91(a-d) below. Total anti-IFN-α antibodies determined for each dose of IFN-α-2b(E41Q) (0.14, 0.42 and 1.26 MIU/kg) and dose control are shown in the Tables. Male and female monkeys are indicated by the animal number preceded by M or F, respectively.

[0897] At days 1, 12 and 26 at the 0.14 MIU/kg dose, no detectable levels of total antibodies, (corresponding to values below the lower limit of the standard curve of the assay, i.e. values similar to dose control that ranged between 109 and 759 ng/mL) were observed, except for animal M5, which showed an antibody concentration of 1744 ng/mL at day 26. At the intermediate and higher dose, antibody was detectable in some animals: animal M9 had a total antibody level of 11943 ng/mL at day 26 at the 0.42 MIU/kg dose and animals F22 and M12 had antibody levels of 2423 and 4299 ng/mL, respectively, at the 1.26 MIU/kg dose at day 26.

[0898] At day 40, all animals who received the 0.14 MIU/kg dose had total antibodies less than 2800 ng/mL (no levels were detected in animals F18 and F17 and M4). For the 0.42 MIU/kg dose, four monkeys presented concentration levels between 10000 and 25000 ng/mL (no levels were detected in F21 and less than 2700 ng/mL in M7).

[0899] For the 1.26 MIU/kg dose, three monkeys showed antibody concentrations less than 1,000 ng/mL, F22 presented a titer about 2909 ng/mL and only one monkey (F24) showed a concentration of 28000 ng/mL.

[0900] At day 89, less than 21000 ng/mL of total antibodies were detected in monkey serum at 0.14 MIU/kg and 1.26 MIU/kg doses, except for F24 which showed 60497 ng/mL at the 1.26 MIU/kg dose. At the 0.42 MIU/kg dose, four out of the six monkeys showed total antibody concentrations between 40000 and 70000 ng/mL and one monkey (F21) presented detectable total antibodies of less than 1000 ng/mL.

[0901] Thus, Similar to the results for neutralizing anti-IFN-α antibodies, total anti-IFN-α antibodies increased with doses and duration of treatments and were more pronounced in the intermediate dose group than in the high dose group and considerable animal to animal variation was apparent.

TABLE 91a
Dose of 0.14 MIU/kg

| | Total anti-IFN-α antibodies (ng/mL) | | | | | | | | | | | |
|---|---|---|---|---|---|---|---|---|---|---|---|---|
| Day | F16 | SD | F17 | SD | F18 | SD | M4 | SD | M5 | SD | M6 | SD |
| 1 | 258 | 59 | 324 | 156 | 47 | nd | 276 | 98 | 723 | 177 | 762 | 132 |
| 12 | 199 | nd | 320 | nd | 30 | nd | 546 | nd | 705 | 297 | 410 | 228 |
| 26 | 340 | nd | 415 | nd | 610 | nd | nd | nd | 1744 | 257 | 739 | 368 |
| 40 | 2787 | 169 | 23 | nd | nd | nd | nd | nd | 1931 | 285 | 1579 | 122 |
| 89 | 11487 | 296 | 11746 | 25 | nd | nd | 7431 | 29 | 20494 | 1475 | 5838 | 103 |

estimated value X < 610 ng/ml (inferior limit of the standard curve)
nd = not detected
SD = standard deviation

TABLE 91b
Dose of 0.42 MIU/kg

| | Total anti-IFN-α antibodies (ng/mL) | | | | | | | | | | | |
|---|---|---|---|---|---|---|---|---|---|---|---|---|
| Day | F16 | SD | F17 | SD | F18 | SD | M4 | SD | M5 | SD | M6 | SD |
| 1 | nd | nd | nd | nd | 31 | nd | 42 | 25 | 584 | nd | 346 | 247 |
| 12 | 466 | nd | nd | nd | 495 | nd | 253 | nd | 315 | 59 | 177 | nd |
| 26 | 1814 | 5 | 3409 | 158 | nd | nd | 1513 | 210 | 5548 | 23 | 11943 | 1042 |
| 40 | 24321 | 152 | 16026 | 921 | 343 | 315 | 2648 | 1162 | 21349 | 724 | 13948 | 1111 |
| 89 | 68256 | 3724 | 53059 | 2546 | 939 | 177 | 18685 | 180 | 64022 | 5288 | 41508 | 1559 |

estimated value X < 584 ng/mL (inferior limit of the standard curve)
nd = not detected
SD = standard deviation

TABLE 91c
Dose of 1.26 MIU/kg

| | Total anti-IFN-α antibodies (ng/mL) | | | | | | | | | | | |
|---|---|---|---|---|---|---|---|---|---|---|---|---|
| Day | F22 | SD | F23 | SD | F24 | SD | M10 | SD | M11 | SD | M12 | SD |
| 1 | nd | nd | 206 | nd | nd | nd | 252 | 179 | 283 | 144 | 60 | nd |
| 12 | 87 | nd | 8 | 5 | nd | nd | 119 | nd | 102 | nd | 129 | 91 |
| 26 | 2423 | 26 | nd | nd | 896 | 36 | nd | nd | 60 | nd | 4299 | 60 |
| 40 | 2909 | 179 | 387 | 1 | 27976 | 1131 | 108 | 52 | 890 | 140 | 8945 | 192 |
| 89 | 11987 | 1188 | 372 | 3 | 60497 | 1075 | 351 | nd | 2202 | 147 | 16761 | 279 |

estimated value X < 351 ng/mL (inferior limit of the standard curve)
nd = not detected
SD = standard deviation

TABLE 91d
Dose control

| | Total anti-IFN-α antibodies (ng/mL) | | | | | | | | | | | |
|---|---|---|---|---|---|---|---|---|---|---|---|---|
| Day | F13 | SD | F14 | SD | F15 | SD | M1 | SD | M2 | SD | M3 | SD |
| 1 | nd | nd | 224 | 54 | 708 | nd | 237 | nd | 298 | 130 | 759 | nd |
| 12 | 283 | nd | 571 | nd | 171 | nd | nd | nd | 851 | 87 | 315 | 95 |
| 26 | 260 | nd | 328 | 279 | nd | nd | nd | nd | 655 | nd | 702 | 701 |
| 40 | 199 | nd | 191 | nd | nd | nd | 109 | nd | 440 | 88 | 423 | nd |
| 89 | 125 | nd | nd | nd | 520 | nd | nd | nd | 344 | nd | 642 | nd |

estimated value X < 759 ng/mL (inferior limit of the standard curve)
nd = not detected
SD = standard deviation

[0902] No neutralizing antibody levels were detected at doses of 0.14, 0.42 and 1.26 MIU/kg in injected monkeys until day 26 of the study. Similarly, low amounts of total antibodies were detected at day 26 in blood samples of two animals (with no negative effect on pharmacokinetic profile of IFN-α-2b(E41Q)). At day 40 of the study, a moderate increase in the amount of both total and neutralizing antibodies was observed in four animals.

[0903] At day 89 of the study, a high heterogeneity in individual antibody responses to repeated SC administration of IFN-α-2b(E41Q) was observed in monkeys given the 0.42 MIU/kg dose and to a lesser extent with the 1.26 MIU/kg dose for both total and neutralizing antibodies. An impairment of pharmacokinetic profile was observed in several monkeys showing high levels of neutralizing antibodies (two males and two females for the 0.42 MIU/kg dose and one female at the 1.26 MIU/kg dose).

[0904] To conclude, no induction of immunogenicity leading to an impairment of the pharmacokinetic profile of IFN-α-2b(E41Q) was observed up to day 26 of the study with doses of 0.14, 0.42 and 1.26 MIU/kg twice a week.

[0905] c. Comparative Immunogenicity Study on Antibody-Positive Samples

[0906] Blood samples showing positive values for total and neutralizing antibodies from the studies above were assessed for determinations of binding antibodies (BAb) and neutralizing antibody (NAb) titers using RIA and CPE assays, respectively (performed by BioMonitor ApS, Copenhagen, DK). An additional cross-reactivity assay also was performed for both binding and neutralizing antibodies directed against IFN-α-2b(E41Q) and native IFN-α.

[0907] i. RIA Assay

[0908] After serial dilution of blood samples in buffer (1:10, 1:100, 1:1000 and 1:10000), the RIA titration assay was performed by incubating 50 μL of diluted serum overnight with 50 μL of ¹²⁵I-labeled IFN-α-2b(E41Q) (4000-4500 cpm) at 4° C. The binding antibodies were detected after elution of the sample from a Protein G column. Counts (cpm) bound to antibodies were expressed as percentages of total eluted cpm. The results were compared to the results from the total anti-IFN-α antibody concentrations in monkey plasma samples using the human anti-IFN-α Bender Medsystems Immunoassay Kit (BMS, 217-Tebu, France) as set forth in part ii above. The samples were diluted 5-fold according to the manufacturer's protocol. Results were expressed in ng/mL after extrapolation from standard OD curve measured with a spectrophotometer at 450 nm.

[0909] Total antibody data obtained from RIA and ELISA assays correlated well for all monkey blood samples. The statistical analysis demonstrated that the two data sets were nearly super-imposable (p<0.0001). Samples with low amounts of total antibodies determined by ELISA presented a low percentage of binding antibodies following RIA assays. Similarly, samples showing a high amount of total antibodies in the ELISA assay presented a high percentage of binding antibodies. The differences in absolute values obtained for each samples with the two assays resulted from the different methodologies used.

[0910] ii. CPE Assay

[0911] A cytopathic effect (CPE) assay was performed to measure the ability of blood samples from above to protect the viability of MC-5 cells (a subclone of A549 lung cells) exposed to an otherwise toxic level of encephalomyocarditis virus (CPE-EMCV). Serial 2-fold dilutions of IFN-α-2b(E41Q) were tested in order to determine the highest dilution resulting in a reduction of IFN activity from 10 to 1 LU/mL (1 LU (Laboratory Unit)/mL is the amount of IFN inducing 50% protection against challenge virus). Serum samples obtained from treated animals above were incubated with IFN-α-2b(E41Q) at a final concentration of 10 LU/mL for 1 h at 37° C. After this incubation period, EMC virus was added, and the cell plates were incubated overnight at 37° C. in a 5% CO₂ incubator, after which MTS was added and further incubated for 2 h at 37° C. in a 5% CO₂ incubator. The results were given as Kawade titer.

[0912] The results of the CPE assay were compared to the results obtained from the quantitative determination of neutralizing antibodies specific to IFN-α-2b(E41Q) as described above using the Kawade's assay. Monkey blood samples with high neutralizing antibody titers in Kawade's assay using HeLa cells also presented a high amount of neutralizing antibody levels in the assay performed using A549 lung cells. Similarly, samples with low or intermediate levels of NAb detected using HeLa cells also were well correlated with results obtained from the A549 lung cell assay. The differences in absolute values obtained for each samples with assay using HeLa cells and A549 lung cells were probably due to a higher sensitivity of HeLa cells in Kawade's assay.

[0913] iii. Cross-Reactivity Assays

[0914] To define more precisely the immunogenic properties of IFN-α-2b(E41Q) compared to native IFN-α, cross-reactivity assays were performed on serum samples from treated monkeys for binding and neutralizing antibodies. Neutralizing and binding antibodies specific to IFN-α-2b(E41Q) and native IFN-α were titrated using Kawade and RIA assays, respectively.

[0915] The samples titrated for neutralizing antibodies exhibited equal amounts of IFN-α-2b(E41Q) and native IFN-α-specific antibodies, except for 3 blood samples which showed a clear increase in neutralizing antibodies specific to native IFN-α compared to IFN-α-2b(E41Q). Similarly, no significant differences were observed in the percentage of binding antibodies specific to IFN-α-2b(E41Q) compared to native IFN-α for all positive monkey blood samples tested. Thus, the results show that neutralizing and binding antibodies specific to IFN-α-2b(E41Q) and native IFN-α cross-reacted with excellent correspondence (p value <0.0001 in both cases).

[0916] d. Summary

[0917] These results provided demonstrate that the IFN-α-2b(E41Q) molecular mutation induced no new immunogenic epitope compared to native IFN-α. This observation was in accordance with data obtained from the in silico immunogenicity prediction showing a decrease in T-cell epitope score resulting from the IFN-α-2b(E41Q) mutation. In the studies undertaken, the immunologic behavior of IFN-α-2b(E41Q) and of native IFN-α were nearly super-imposable. Therefore, IFN-α-2b(E41Q) should not present new, increased antigenicity.

[0918] 3. Total and Neutralizing Antibodies-2-Week Oral (Enteric-Coated Tablets) Toxicity Study in Cynomolgus Monkeys (Macaca fascicularis) by the Oral Route

[0919] Monkeys were treated as described in Example 16.B.1. Blood samples were taken from all the animals at pre-dose and 24 h after administrations at days 1, 6, and 13 for each tested dose and both total and neutralizing anti-IFN-α-2b(E41Q) antibodies were determined using the human anti-IFN-α antibodies by ELISA and using Kawade's assay, respectively, as described above.

[0920] The results showed no detectable anti-IFN-α-2b(E41Q) antibodies (total and neutralizing) at pre-dose and at days 2, 7 and 14 after daily administration of oral IFN-α-2b(E41Q) enteric-coated tablets. In each case, the antibody concentrations (for total antibodies) or Kawade titers (for neutralizing antibodies) measured in all monkey serum were below the background limits determined with pre-dose samples. Also, no neutralizing or total antibody levels were detected with IFN-α-2b(E41Q) doses of 0.6, 1.2 and 2.4 mg per animal in monkey serum after daily PO administration of IFN-α-2b(E41Q) enteric-coated tablets over 2 weeks. Thus, repeated oral administration of IFN-α-2b(E41Q) (enteric-coated tablet formulation) to Cynomolgus monkeys during 2 weeks induced no total or neutralizing antibodies at doses of 0.6, 1.2 and 2.4 mg per animal.

### B. Rats—Total and Neutralizing Antibodies: 2-Week Oral Toxicity Study in Rats by Oral Administration

[0921] Rats were treated as described in Example 16.A.2. Blood samples were taken from all the animals from the satellite group for the measurement of both total and neutralizing anti-IFN-α antibody levels.

[0922] 1. Neutralizing Antibodies

[0923] Neutralizing antibody was determined using the Kawade's assay using HeLa cells as described above. A neutralizing antibody titer >20 TRU/mL (Ten-fold Reducing Unit) was considered as the threshold for positivity.

[0924] The results showed no detectable levels of neutralizing antibodies (NAb) in rat serum at day 1 for animals treated with doses of 0.2, 0.4 and 0.6 mg or for enteric-coated placebo tablets in any of the animals tested. At day 15, no detectable NAb levels were measured in eleven rats orally administered with 0.2 mg of IFN-α-2b(E41Q) enteric-coated capsule, and only one male exhibited a positive titer of 81.3 TRU/mL. Similarly, at day 15, no detectable NAb levels were measured in ten rats orally administered with the dose of 0.4 mg/rat, whereas one female and one male showed detectable amounts of NAb of 118.1 TRU/mL and 53.1 TRU/mL, respectively. No titers of NAb were detected in any rats administered orally with the 0.6 mg/animal dose.

[0925] 2. Total Antibodies

[0926] Total antibody was measured using ELISA as described above. No detectable concentrations of total antibodies were measured in rat serum at day 1 from animals treated with doses of 0.2, 0.4 and 0.6 mg, or enteric-coated placebo tablets in all animals tested. At day 15, no total anti-IFN-α-2b(E41Q) antibody was detected in ten rats orally administered with 0.2 mg of IFN-α-2b(E41Q) enteric-coated capsule. At day 15, only two animals, one female and one male, exhibited low concentrations of total antibody of about 8.3 and 0.3 IU/mL, respectively. Similarly, eleven rats administered with a dose of 0.4 mg/rat exhibited no detectable levels of total antibodies, except for one female with a detectable amount of total antibodies about 78.5 IU/mL. Of note, one animal showing positive NAb titer with a dose of 0.4 mg (53.1 TRU/mL), but exhibited no detectable levels of total antibodies. Finally, an absence of total antibody was observed in all rats administered orally with IFN-α-2b(E41Q) dose of 0.6 mg/animal.

[0927] 3. Summary

[0928] No neutralizing and total antibody levels were detected with doses of 0.2 and 0.6 mg per animal in rat serum after daily PO administration of IFN-α-2b(E41Q) enteric-coated capsules over 2 weeks. Based on the pharmacokinetic results from the same animals presented in Example 16.A.2, this finding supports the absence of strong impairment of the IFN-α-2b(E41Q) pharmacokinetic profile observed at day 14 or at day 7 with doses of 0.2, 0.4 and 0.6 mg per animal after daily administration by oral route of IFN-α-2b(E41Q) enteric-coated capsules over 2 weeks. With a dose of 0.4 mg, two animals out of a total of twelve animals showed positive NAb titers (only one animal presenting significant total antibody levels). A moderate reduction of Cₘₐₓ and AUC₍₀₋ₜ₎ values was observed between day 1 and day 14 with this dose.

[0929] C. Mice—Immunogenicity of IFN-α-2b(E41Q) in Immune Tolerant IFN-α Transgenic Mice

[0930] The immunogenicity of IFN-α-2b was assessed in transgenic mice (University of Utrecht, Prof Schellekens). Immune tolerant transgenic mice have been used to evaluate the introduction of new epitopes in insulin and tissue plasminogen activator. These mice also have been extensively used to study the immunogenicity of IFN-α preparations. To evaluate the possible presence of a new epitope in IFN-α-2b(E41Q) which could induce immunogenicity in humans, the immunogenicity of IFN-α and IFN-α-2b(E41Q) were compared in wild-type and IFN-α-2 immune tolerant transgenic mice.

[0931] Groups of five wild-type FVB/N or IFN-α-2 transgenic mice were injected intraperitoneally (IP) with 10 μg of IFN-α-2b(E41Q) or IFN-α-2a 5 days a week for 3 weeks. Blood samples were taken weekly (at day 0 before the first interferon injection and at days 7, 14, 21 and 28) and tested for the presence of antibodies to IFN-α in a bridging ELISA assay from MDS Pharma Services (Zurich, Switzerland). This assay made use of a recombinant IFN-α to catch circulating anti-IFN-α antibodies in serum samples from wild-type and transgenic mice treated with native and mutant IFN-α, respectively. Bound antibodies were detected by the addition of labeled (biotinylated) antigen and streptavidin-coupled detection enzyme.

[0932] The results showed that both IFN-α-2b(E41Q) and native IFN-α induced high levels of antibodies in wild-type mice. The immune tolerant mice showed no immune response to IFN-α or IFN-α-2b(E41Q). These results indicated that the single amino acid mutation of IFN-α-2b(E41Q) did not introduce a new epitope since no difference in antibody levels was observed for both immune tolerant and wild-type mice injected with IFN-α-2b(E41Q) versus native IFN-α.

### Example 21

[0933] Cloning and Generation of hGH(Y42I)

[0934] 1. Cloning of Native hGH for Expression in Mammalian Cells

[0935] A nucleic acid molecule encoding hGH protein (see, SEQ ID NO: 1260) was cloned into a mammalian expression vector, prior to the generation of the selected mutations. A collection of pre-designed, targeted mutants was then generated such that each individual mutant was created and processed individually, physically separated from each other and in addressable arrays.

[0936] The hGH-cDNA was obtained by synthesis in vitro from human pituitary gland mRNA (Clontech) using SMART kit (Clontech). First, hGH-encoding cDNA was cloned by PCR amplification using the following primers:

forward GH1

(SEQ ID NO: 2109)

5′-ATGGCTACAGGCTCCCGGACGTCCCTGCCTCC-3′
and
reverse GH1 REV

(SEQ ID NO: 2110)

5′-CTAGAAGCCACAAGCTGCCCCTCCACAGAGCGGCACT-3′.

[0937] The PCR amplified product was cloned into an E. coli vector (pTOPO-TA (SEQ ID NO: 2070) to produce the plasmid designated pTOPO-hGH4 (SEQ ID NO: 2120).

[0938] The sequence of the hGH-encoding cDNA was confirmed by sequencing. The sequenced cDNA was then PCR amplified using the following primers:

hGHFORHIND (HindII site underlined)

(SEQ ID NO: 2111)

5′-AAAAAGCTTATGGCTACAGGCTCCCGGACG-3′
and
hGHREV (XbaI site underlined)

(SEQ ID NO: 2112)

5′-GCCCTTCTAGAAGCCACAGCTGCCCTCCACAG-3′.

[0939] hGHFORHIND and hGHREV generate HindIII and XbaI restriction sites, respectively, on either end of the clone. After restriction digestion with HindIII and XbaI, the PCR fragment containing the hGH-encoding cDNA was subcloned into the corresponding sites in pUC-CMVhGHpA to produce pNAUT-hGH (SEQ ID NO: 2119).

[0940] 2. Design of GH Variants by 2D-Scanning

[0941] 2D-scanning technology, described herein and also described in U.S. application Ser. Nos. 10/658,355 and 11/267,871, was used to design and obtain hGH mutants with improved resistance to proteolysis. Is-HITs were identified based upon (1) protein property to be evolved (i.e., resistance to proteolysis); (2) amino acid sequence; and (3) properties of individual amino acids.

[0942] Positions selected (is-HITs) on pituitary hGH (SEQ ID NO:1) were (numbering corresponds to amino acid positions in the mature protein): F1, P2, P5, L6, R8, L9, F10, D11, L15, R16, R19, L20, L23, F25, D26, Y28, E30, F31, E32, E33, Y35, P37, K38, E39, K41, Y42, F44, L45, P48, L52, F54, E56, P59, P61, R64, E65, E66, K70, L73, E74, L75, L76, R77, L80, L81, L82, W86, L87, E88, P89, F92, L93, R94, F97, L10, Y103, D107, Y111, D112, L113, L114, K115, D116, L117, E118, E119, L124, M125, R127, L128, E129, D130, P133, R134, F139, K140, Y143, K145, F146, D147, D153, D154, L156, K158, Y160, L162, L163, Y164, F166, R167, K168, D169, M170, D171, K172, E174, F176, L177, R178, R183, E186, and F191. The residue substitutions performed are listed in Table 92.

TABLE 92
Amino acid replacements

| Amino acid at is-HIT | Replacing amino acids |
|---|---|
| R | H, Q |
| E | H, Q, N |
| K | Q, N |
| D | N, Q |
| M | I, V |
| P | A, S |
| Y | I, H |
| F | I, V |
| W | H, S |
| L | I, V |

[0943] Amino acids at is-HITs (left column of Table 92) were replaced by selected replacing amino acids (right column of Table 92) to produce GH variants with increased resistance to proteolysis. A total of 222 variants of hGH were generated (see Example 1.II.B and Table 24).

[0944] 3. Resistance to Proteolysis

[0945] hGH variants were treated with proteases in order to identify resistant molecules. The relative resistance of the mutant proteins compared to the native protein against enzymatic cleavage was determined by exposure to a mixture of proteases (as described in Example 1.I.A). Treated samples were then used to determine residual activity such as proliferative activity in a cell proliferation assay (as described in Example 1.I.C.1; see Table 24 for results). The results show that many of the polypeptides tested exhibited an increased resistance to protease in vitro as compared to native hGH.

[0946] 4. Cloning of Native hGH for Prokaryotic Expression

[0947] To express hGH in E. coli, the hGH encoding cDNA fragment was amplified by PCR from pNAUT-hGH (SEQ ID NO: 2119), using the primers hGHFORPET (SEQ ID NO: 2113) and hGHREVPET (SEQ ID NO: 2114), using Herculases (Invitrogen) DNA-polymerase.

[0948] The forward primer hGHFORPET was designed to introduce an NdeI restriction site and to change Proline 2 and Proline 5 codons from human codons to higher usage codons for E. coli (CCA to CCG and CCC to CCG).

hGHFORPET (NdeI site underlined):

(SEQ ID NO: 2113)

5′-GGGAATTCCATATGTTCCCGACCATTCCGTTATCCAGG-3′

[0949] The reverse primer hGHREVPET was designed to introduce a BamHI restriction site and to change the STOP codon from TAG to TAA in order to optimize the hGH protein production yield in E. coli.

hGHREVPET (BamHI site underlined):

(SEQ ID NO: 2114)

5′-CGGGATCCCTTAAGAAGCCACAGCTGCCCTCCACAGAGC-3′

[0950] The PCR fragment was subcloned into pET-24 (Invitrogen; SEQ ID NO: 2069). In order to further optimize the hGH yield in E. coli, additional changes were made in the hGH sequence. Cycles of mutagenesis were used to change the codons that code for arginine at positions Arg 8 and Arg 16 in the mature hGH polypeptide. The arginine codons were changed to codons to higher usage codons in E. coli. The following mutagenesis primers were used:

[0951] Primers for Arg8 codon mutagenesis,

hGHARG8FOR:

(SEQ ID NO: 2115)

5′-CCGACCATTCCGTTACCCGTCTTTTTGACAA-3′
and
hGHARG8REV:

(SEQ ID NO: 2116)

5′-GAGCATAGCGTTGTCAAAAAGACGGGATAACG-3′.

[0952] Primers for Arg16 codon mutagenesis,

hGHARG16FOR

(SEQ ID NO: 2117)

5′-GACAACGCTATGCTCCGTGCCCATCGTCTGCACCAG-3′
and
hGHARG16REV

(SEQ ID NO: 2118)

5′-CTGGTGCAGACGATGGGCACGGAGCATAGCGTTGTC-3′.

[0953] Following rounds of mutagenesis, the resulting construct was verified by sequencing. The final expression plasmid was designated pET-24Naut-hGH (SEQ ID NO: 2121). Generation of the exemplary mutation, Y42I, in pET-24Naut-hGH was performed using site-directed mutagenesis techniques analogous to those described in EXAMPLE 2d. The design of the mutagenic primer was made to effect mutation of codon at nucleotide positions 4719 to 4721 of SEQ ID NO: 2121 from TAT to ATC.

[0954] The pET-24Naut-hGH(Y42I) plasmid has the following sequence of amino acids:

| | |
|---|---|
| 1 | CTAGTCGGGG AAATGTGCGC GGAACCCCTA TTTGTTTATT |
| | TTTCTAAATA |
| 51 | CATTCAAATA TGTATCCGCT CATGAATTAA TTCTTAGAAA |
| | AACTCATCGA |
| 101 | GCATCAAATG AAACTGCAAT TTATTCATAT CAGGATTATC |
| | AATACCATAT |
| 151 | TTTTGAAAAA GCCGTTTCTG TAATGAAGGA GAAAACTCAC |
| | CGAGGCAGTT |
| 201 | CCATAGGATG GCAAGATCCT GGTATCGGTC TGCGATTCCG |
| | ACTCGTCCAA |
| 251 | CATCAATACA ACCTATTAAT TTCCCCTCGT CAAAAATAAG |
| | GTTATCAAGT |
| 301 | GAGAAATCAC CATGAGTGAC GACTGAATCC GGTGAGAATG |
| | GCAAAAGTTT |
| 351 | ATGCATTTCT TTCCAGACTT GTTCAACAGG CCAGCCATTA |
| | CGCTCGTCAT |
| 401 | CAAAATCACT CGCATCAACC AAACCGTTAT TCATTCGTGA |
| | TTGCGCCTGA |
| 451 | GCGAGACGAA ATACGCGATC GCTGTTAAAA GGACAATTAC |
| | AAACAGGAAT |
| 501 | CGAATGCAAC CGGCGCAGGA ACACTGCCAG CGCATCAACA |
| | ATATTTTCAC |
| 551 | CTGAATCAGG ATATTCTTCT AATACCTGGA ATGCTGTTTT |
| | CCCGGGGATC |
| 601 | GCAGTGGTGA GTAACCATGC ATCATCAGGA GTACGGATAA |
| | AATGCTTGAT |
| 651 | GCTCGGAAGA GGCATAAATT CCGTCAGCCA GTTTAGTCTG |
| | ACCATCTCAT |
| 701 | CTGTAACATC ATTGGCAACG CTACCTTTGC CATGTTTCAG |
| | AAACAACTCT |
| 751 | GGCGCATCGG GCTTCCCATA CAATCGATAG ATTGTCGCAC |
| | CTGATTGCCC |
| 801 | GACATTATCG GGAGCCCATT TATACCCATA TAAATCAGCA |
| | TCCATGTTGG |
| 851 | AATTTAATCG CGGCCTAGAG CAAGACGTTT CCCGTTGAAT |
| | ATGGCTCATA |
| 901 | ACACCCCTTG TATTACTGTT TATGTAAGCA GACAGTTTTA |
| | TTGTTCATGA |
| 951 | CCAAAATCCC TTAACGTGAG TTTTCGTTCC ACTGAGCGTC |
| | AGACCCCGTA |
| 1001 | GAAAAGATCA AAGGATCTTC TTGAGATCCT TTTTTTCTGC |
| | GCGTAATCTG |
| 1051 | CTGCTTGCAA ACAAAAAAAC CACCGCTACC AGCGGTGGTT |
| | TGTTTGCCGG |
| 1101 | ATCAAGAGCT ACCAACTCTT TTTCCGAAGG TAACTGGCTT |
| | CAGCAGAGCG |
| 1151 | CAGATACCAA ATACTGTCCT TCTAGTGTAG CCGTAGTTAG |
| | GCCACCACTT |
| 1201 | CAAGAACTCT GTAGCACCGC CTACATACCT CGCTCTGCTA |
| | ATCCTGTTAC |
| 1251 | CAGTGGCTGC TGCCAGTGGC GATAAGTCGT GTCTTACCGG |
| | GTTGGACTCA |
| 1301 | AGACGATAGT TACCGGATAA GGCGCAGCGG TCGGGCTGAA |
| | CGGGGGGTTC |
| 1351 | GTGCACACAG CCCAGCTTGG AGCGAACGAC CTACACCGAA |
| | CTGAGATACC |
| 1401 | TACAGCGTGA GCTATGAGAA AGCGCCACGC TTCCCGAAGG |
| | GAGAAAGGCG |
| 1451 | GACAGGTATC CGGTAAGCGG CAGGGTCGGA ACAGGAGAGC |
| | GCACGAGGGA |
| 1501 | GCTTCCAGGG GGAAACGCCT GGTATCTTTA TAGTCCTGTC |
| | GGGTTTCGCC |
| 1551 | ACCTCTGACT TGAGCGTCGA TTTTTGTGAT GCTCGTCAGG |
| | GGGGCGGAGC |
| 1601 | CTATGGAAAA ACGCCAGCAA CGCGGCCTTT TTACGGTTCC |
| | TGGCCTTTTG |
| 1651 | CTGGCCTTTT GCTCACATGT TCTTTCCTGC GTTATCCCCT |
| | GATTCTGTGG |
| 1701 | ATAACCGTAT TACCGCCTTT GAGTGAGCTG ATACCGCTCG |
| | CCGCAGCCGA |
| 1751 | ACGACCGAGC GCAGCGAGTC AGTGAGCGAG GAAGCGGAAG |
| | AGCGCCTGAT |
| 1801 | GCGGTATTTT CTCCTTACGC ATCTGTGCGG TATTTCACAC |
| | CGCAATGGTG |
| 1851 | CACTCTCAGT ACAATCTGCT CTGATGCCGC ATAGTTAAGC |
| | CAGTATACAC |
| 1901 | TCCGCTATCG CTACGTGACT GGGTCATGGC TGCGCCCCGA |
| | CACCCGCCAA |
| 1951 | CACCCGCTGA CGCGCCCTGA CGGGCTTGTC TGCTCCCGGC |
| | ATCCGCTTAC |
| 2001 | AGACAAGCTG TGACCGTCTC CGGGAGCTGC ATGTGTCAGA |
| | GGTTTTCACC |
| 2051 | GTCATCACCG AAACGCGCGA GGCAGCTGCG GTAAAGCTCA |
| | TCAGCGTGGT |
| 2101 | CGTGAAGCGA TTCACAGATG TCTGCCTGTT CATCCGCGTC |
| | CAGCTCGTTG |
| 2151 | AGTTTCTCCA GAAGCGTTAA TGTCTGGCTT CTGATAAAGC |
| | GGGCCATGTT |
| 2201 | AAGGGCGGTT TTTTCCTGTT TGGTCACTGA TGCCTCCGTG |
| | TAAGGGGGAT |
| 2251 | TTCTGTTCAT GGGGGTAATG ATACCGATGA AACGAGAGAG |
| | GATGCTCACG |
| 2301 | ATACGGGTTA CTGATGATGA ACATGCCCGG TTACTGGAAC |
| | GTTGTGAGGG |
| 2351 | TAAACAACTG GCGGTATGGA TGCGGCGGGA CCAGAGAAAA |
| | ATCACTCAGG |
| 2401 | GTCAATGCCA GCGCTTCGTT AATACAGATG TAGGTGTTCC |
| | ACAGGGTAGC |
| 2451 | CAGCAGCATC CTGCGATGCA GATCCGGAAC ATAATGGTGC |
| | AGGGCGCTGA |
| 2501 | CTTCCGCGTT TCCAGACTTT ACGAAACACG GAAACCGAAG |
| | ACCATTCATG |
| 2551 | TTGTTGCTCA GGTCGCAGAC GTTTTGCAGC AGCAGTCGCT |
| | TCACGTTCGC |
| 2601 | TCGCGTATCG GTGATTCATT CTGCTAACCA GTAAGGCAAC |
| | CCCGCCAGCC |
| 2651 | TAGCCGGGTC CTCAACGACA GGAGCACGAT CATGCGCACC |
| | CGTGGGGCCG |
| 2701 | CCATGCCGGC GATAATGGCC TGCTTCTCGC CGAAACGTTT |
| | GGTGGCGGGA |
| 2751 | CCAGTGACGA AGGCTTGAGC GAGGGCGTGC AAGATTCCGA |
| | ATACCGCAAG |
| 2801 | CGACAGGCCG ATCATCGTCG CGCTCCAGCG AAAGCGGTCC |
| | TCGCCGAAAA |
| 2851 | TGACCCAGAG CGCTGCCGGC ACCTGTCCTA CGAGTTGCAT |
| | GATAAAGAAG |
| 2901 | ACAGTCATAA GTGCGGCGAC GATAGTCATG CCCCGCGCCC |
| | ACCGGAAGGA |
| 2951 | GCTGACTGGG TTGAAGGCTC TCAAGGGCAT CGGTCGAGAT |
| | CCCGGTGCCT |
| 3001 | AATGAGTGAG CTAACTTACA TTAATTGCGT TGCGCTCACT |
| | GCCCGCTTTC |
| 3051 | CAGTCGGGAA ACCTGTCGTG CCAGCTGCAT TAATGAATCG |
| | GCCAACGCGC |
| 3101 | GGGGAGAGGC GGTTTGCGTA TTGGGCGCCA GGGTGGTTTT |
| | TCTTTTCACC |
| 3151 | AGTGAGACGG GCAACAGCTG ATTGCCCTTC ACCGCCTGGC |
| | CCTGAGAGAG |
| 3201 | TTGCAGCAAG CGGTCCACGC TGGTTTGCCC CAGCAGGCGA |
| | AAATCCTGTT |
| 3251 | TGATGGTGGT TAACGGCGGG ATATAACATG AGCTGTCTTC |
| | GGTATCGTCG |
| 3301 | TATCCCACTA CCGAGATATC CGCACCAACG CGCAGCCCGG |
| | ACTCGGTAAT |
| 3351 | GGCGCGCATT GCGCCCAGCG CCATCTGATC GTTGGCAACC |
| | AGCATCGCAG |
| 3401 | TGGGAACGAT GCCCTCATTC AGCATTTGCA TGGTTTGTTG |
| | AAAACCGGAC |
| 3451 | ATGGCACTCC AGTCGCCTTC CCGTTCCGCT ATCGGCTGAA |
| | TTTGATTGCG |
| 3501 | AGTGAGATAT TTATGCCAGC CAGCCAGACG CAGACGCGCC |
| | GAGACAGAAC |
| 3551 | TTAATGGGCC CGCTAACAGC GCGATTTGCT GGTGACCCAA |
| | TGCGACCAGA |
| 3601 | TGCTCCACGC CCAGTCGCGT ACCGTCTTCA TGGGAGAAAA |
| | TAATACTGTT |
| 3651 | GATGGGTGTC TGGTCAGAGA CATCAAGAAA TAACGCCGGA |
| | ACATTAGTGC |
| 3701 | AGGCAGCTTC CACAGCAATG GCATCCTGGT CATCCAGCGG |
| | ATAGTTAATG |
| 3751 | ATCAGCCCAC TGACGCGTTG CGCGAGAAGA TTGTGCACCG |
| | CCGCTTTACA |
| 3801 | GGCTTCGACG CCGCTTCGTT CTACCATCGA CACCACCACG |
| | CTGGCACCCA |
| 3851 | GTTGATCGGC GCGAGATTTA ATCGCCGCGA CAATTTGCGA |
| | CGGCGCGTGC |
| 3901 | AGGGCCAGAC TGGAGGTGGC AACGCCAATC AGCAACGACT |
| | GTTTGCCCGC |
| 3951 | CAGTTGTTGT GCCACGCGGT TGGGAATGTA ATTCAGCTCC |
| | GCCATCGCCG |
| 4001 | CTTCCACTTT TTCCCGCGTT TTCGCAGAAA CGTGGCTGGC |
| | CTGGTTCACC |
| 4051 | ACGCGGGAAA CGGTCTGATA AGAGACACCG GCATACTCTG |
| | CGACATCGTA |
| 4101 | TAACGTTACT GGTTTCACAT TCACCACCCT GAATTGACTC |
| | TCTTCCGGGC |
| 4151 | GCTATCATGC CATACCGCGA AAGGTTTTGC GCCATTCGAT |
| | GGTGTCCGGG |
| 4201 | ATCTCGACGC TCTCCCTTAT GCGACTCCTG CATTAGGAAG |
| | CAGCCCAGTA |
| 4251 | GTAGGTTGAG GCCGTTGAGC ACCGCCGCCG CAAGGAATGG |
| | TGCATGCAAG |
| 4301 | GAGATGGCGC CCAACAGTCC CCCGGCCACG GGGCCTGCCA |
| | CCATACCCAC |
| 4351 | GCCGAAACAA GCGCTCATGA GCCCGAAGTG GCGAGCCCGA |
| | TCTTCCCCAT |
| 4401 | CGGTGATGTC GGCGATATAG GCGCCAGCAA CCGCACCTGT |
| | GGCGCCGGTG |
| 4451 | ATGCCGGCCA CGATGCGTCC GGCGTAGAGG ATCGAGATCT |
| | CGATCCCGCG |
| 4501 | AAATTAATAC GACTCACTAT AGGGGAATTG TGAGCGGATA |
| | ACAATTCCCC |
| 4551 | TCTAGAAATA ATTTTGTTTA ACTTTAAGAA GGAGATATAC |
| | ATATGTTCCC |
| 4601 | GACCATTCCG TTATCCCGTC TTTTTGACAA CGCTATGCTC |
| | CGTGCCCATC |
| 4651 | GTCTGCACCA GCTGGCCTTT GACACCTACC AGGAGTTTGA |
| | AGAAGCCTAT |
| 4701 | ATCCCAAAGG AACAGAAGAT CTCATTCCTG CAGAACCCCC |
| | AGACCTCCCT |
| 4751 | CTGTTTCTCA GAGTCTATTC CGACACCCTC CAACAGGGAG |
| | GAAACACAAC |
| 4801 | AGAAATCCAA CCTAGAGCTG CTCCGCATCT CCCTGCTGCT |
| | CATCCAGTCG |
| 4851 | TGGCTGGAGC CCGTGCAGTT CCTCAGGAGT GTCTTCGCCA |
| | ACAGCCTGGT |
| 4901 | GTACGGCGCC TCTGACAGCA ACGTCTATGA CCTCCTAAAG |
| | GACCTAGAGG |
| 4951 | AAGGCATCCA AACGCTGATG GGGAGGCTGG AAGATGGCAG |
| | CCCCCGGACT |
| 5001 | GGGCAGATCT TCAAGCAGAC CTACAGCAAG TTCGACACAA |
| | ACTCACACAA |
| 5051 | CGATGACGCA CTACTCAAGA ACTACGGGCT GCTCTACTGC |
| | TTCAGGAAGG |
| 5101 | ACATGGACAA GGTCGAGACA TTCCTGCGCA TCGTGCAGTG |
| | CCGCTCTGTG |
| 5151 | GAGGGCAGCT GTGGCTTCTA AGGATCCGAA TTCGAGCTCC |
| | GTCGACAAGC |
| 5201 | TTGCGGCCGC ACTCGATGAG CAATAACTAG CATAACCCCT |
| | TGGGGCCTCT |
| 5251 | AAACGGGTCT TGAGGGGTTT TTTGCTGAAA GGAGGAA |

[0955] Another exemplary mutation, Y42H, also was similarly generated by mutagenesis; the design of the mutagenic primer was made to effect mutation of codon at nucleotide positions 4719 to 4721 of SEQ ID NO: 2121 from TAT to CAC.

[0956] The pET-24Naut-hGH(Y42I) plasmid has the following sequence of amino acids:

| | |
|---|---|
| 1 | CTAGTCGGGG AAATGTGCGC GGAACCCCTA TTTGTTTATT |
| | TTTCTAAATA |
| 51 | CATTCAAATA TGTATCCGCT CATGAATTAA TTCTTAGAAA |
| | AACTCATCGA |
| 101 | GCATCAAATG AAACTGCAAT TTATTCATAT CAGGATTATC |
| | AATACCATAT |
| 151 | TTTTGAAAAA GCCGTTTCTG TAATGAAGGA GAAAACTCAC |
| | CGAGGCAGTT |
| 201 | CCATAGGATG GCAAGATCCT GGTATCGGTC TGCGATTCCG |
| | ACTCGTCCAA |
| 251 | CATCAATACA ACCTATTAAT TTCCCCTCGT CAAAAATAAG |
| | GTTATCAAGT |
| 301 | GAGAAATCAC CATGAGTGAC GACTGAATCC GGTGAGAATG |
| | GCAAAAGTTT |
| 351 | ATGCATTTCT TTCCAGACTT GTTCAACAGG CCAGCCATTA |
| | CGCTCGTCAT |
| 401 | CAAAATCACT CGCATCAACC AAACCGTTAT TCATTCGTGA |
| | TTGCGCCTGA |
| 451 | GCGAGACGAA ATACGCGATC GCTGTTAAAA GGACAATTAC |
| | AAACAGGAAT |
| 501 | CGAATGCAAC CGGCGCAGGA ACACTGCCAG CGCATCAACA |
| | ATATTTTCAC |
| 551 | CTGAATCAGG ATATTCTTCT AATACCTGGA ATGCTGTTTT |
| | CCCGGGGATC |
| 601 | GCAGTGGTGA GTAACCATGC ATCATCAGGA GTACGGATAA |
| | AATGCTTGAT |
| 651 | GCTCGGAAGA GGCATAAATT CCGTCAGCCA GTTTAGTCTG |
| | ACCATCTCAT |
| 701 | CTGTAACATC ATTGGCAACG CTACCTTTGC CATGTTTCAG |
| | AAACAACTCT |
| 751 | GGCGCATCGG GCTTCCCATA CAATCGATAG ATTGTCGCAC |
| | CTGATTGCCC |
| 801 | GACATTATCG GGAGCCCATT TATACCCATA TAAATCAGCA |
| | TCCATGTTGG |
| 851 | AATTTAATCG CGGCCTAGAG CAAGACGTTT CCCGTTGAAT |
| | ATGGCTCATA |
| 901 | ACACCCCTTG TATTACTGTT TATGTAAGCA GACAGTTTTA |
| | TTGTTCATGA |
| 951 | CCAAAATCCC TTAACGTGAG TTTTCGTTCC ACTGAGCGTC |
| | AGACCCCGTA |
| 1001 | GAAAAGATCA AAGGATCTTC TTGAGATCCT TTTTTTCTGC |
| | GCGTAATCTG |
| 1051 | CTGCTTGCAA ACAAAAAAAC CACCGCTACC AGCGGTGGTT |
| | TGTTTGCCGG |
| 1101 | ATCAAGAGCT ACCAACTCTT TTTCCGAAGG TAACTGGCTT |
| | CAGCAGAGCG |
| 1151 | CAGATACCAA ATACTGTCCT TCTAGTGTAG CCGTAGTTAG |
| | GCCACCACTT |
| 1201 | CAAGAACTCT GTAGCACCGC CTACATACCT CGCTCTGCTA |
| | ATCCTGTTAC |
| 1251 | CAGTGGCTGC TGCCAGTGGC GATAAGTCGT GTCTTACCGG |
| | GTTGGACTCA |
| 1301 | AGACGATAGT TACCGGATAA GGCGCAGCGG TCGGGCTGAA |
| | CGGGGGGTTC |
| 1351 | GTGCACACAG CCCAGCTTGG AGCGAACGAC CTACACCGAA |
| | CTGAGATACC |
| 1401 | TACAGCGTGA GCTATGAGAA AGCGCCACGC TTCCCGAAGG |
| | GAGAAAGGCG |
| 1451 | GACAGGTATC CGGTAAGCGG CAGGGTCGGA ACAGGAGAGC |
| | GCACGAGGGA |
| 1501 | GCTTCCAGGG GGAAACGCCT GGTATCTTTA TAGTCCTGTC |
| | GGGTTTCGCC |
| 1551 | ACCTCTGACT TGAGCGTCGA TTTTTGTGAT GCTCGTCAGG |
| | GGGGCGGAGC |
| 1601 | CTATGGAAAA ACGCCAGCAA CGCGGCCTTT TTACGGTTCC |
| | TGGCCTTTTG |
| 1651 | CTGGCCTTTT GCTCACATGT TCTTTCCTGC GTTATCCCCT |
| | GATTCTGTGG |
| 1701 | ATAACCGTAT TACCGCCTTT GAGTGAGCTG ATACCGCTCG |
| | CCGCAGCCGA |
| 1751 | ACGACCGAGC GCAGCGAGTC AGTGAGCGAG GAAGCGGAAG |
| | AGCGCCTGAT |
| 1801 | GCGGTATTTT CTCCTTACGC ATCTGTGCGG TATTTCACAC |
| | CGCAATGGTG |
| 1851 | CACTCTCAGT ACAATCTGCT CTGATGCCGC ATAGTTAAGC |
| | CAGTATACAC |
| 1901 | TCCGCTATCG CTACGTGACT GGGTCATGGC TGCGCCCCGA |
| | CACCCGCCAA |
| 1951 | CACCCGCTGA CGCGCCCTGA CGGGCTTGTC TGCTCCCGGC |
| | ATCCGCTTAC |
| 2001 | AGACAAGCTG TGACCGTCTC CGGGAGCTGC ATGTGTCAGA |
| | GGTTTTCACC |
| 2051 | GTCATCACCG AAACGCGCGA GGCAGCTGCG GTAAAGCTCA |
| | TCAGCGTGGT |
| 2101 | CGTGAAGCGA TTCACAGATG TCTGCCTGTT CATCCGCGTC |
| | CAGCTCGTTG |
| 2151 | AGTTTCTCCA GAAGCGTTAA TGTCTGGCTT CTGATAAAGC |
| | GGGCCATGTT |
| 2201 | AAGGGCGGTT TTTTCCTGTT TGGTCACTGA TGCCTCCGTG |
| | TAAGGGGGAT |
| 2251 | TTCTGTTCAT GGGGGTAATG ATACCGATGA AACGAGAGAG |
| | GATGCTCACG |
| 2301 | ATACGGGTTA CTGATGATGA ACATGCCCGG TTACTGGAAC |
| | GTTGTGAGGG |
| 2351 | TAAACAACTG GCGGTATGGA TGCGGCGGGA CCAGAGAAAA |
| | ATCACTCAGG |
| 2401 | GTCAATGCCA GCGCTTCGTT AATACAGATG TAGGTGTTCC |
| | ACAGGGTAGC |
| 2451 | CAGCAGCATC CTGCGATGCA GATCCGGAAC ATAATGGTGC |
| | AGGGCGCTGA |
| 2501 | CTTCCGCGTT TCCAGACTTT ACGAAACACG GAAACCGAAG |
| | ACCATTCATG |
| 2551 | TTGTTGCTCA GGTCGCAGAC GTTTTGCAGC AGCAGTCGCT |
| | TCACGTTCGC |
| 2601 | TCGCGTATCG GTGATTCATT CTGCTAACCA GTAAGGCAAC |
| | CCCGCCAGCC |
| 2651 | TAGCCGGGTC CTCAACGACA GGAGCACGAT CATGCGCACC |
| | CGTGGGGCCG |
| 2701 | CCATGCCGGC GATAATGGCC TGCTTCTCGC CGAAACGTTT |
| | GGTGGCGGGA |
| 2751 | CCAGTGACGA AGGCTTGAGC GAGGGCGTGC AAGATTCCGA |
| | ATACCGCAAG |
| 2801 | CGACAGGCCG ATCATCGTCG CGCTCCAGCG AAAGCGGTCC |
| | TCGCCGAAAA |
| 2851 | TGACCCAGAG CGCTGCCGGC ACCTGTCCTA CGAGTTGCAT |
| | GATAAAGAAG |
| 2901 | ACAGTCATAA GTGCGGCGAC GATAGTCATG CCCCGCGCCC |
| | ACCGGAAGGA |
| 2951 | GCTGACTGGG TTGAAGGCTC TCAAGGGCAT CGGTCGAGAT |
| | CCCGGTGCCT |
| 3001 | AATGAGTGAG CTAACTTACA TTAATTGCGT TGCGCTCACT |
| | GCCCGCTTTC |
| 3051 | CAGTCGGGAA ACCTGTCGTG CCAGCTGCAT TAATGAATCG |
| | GCCAACGCGC |
| 3101 | GGGGAGAGGC GGTTTGCGTA TTGGGCGCCA GGGTGGTTTT |
| | TCTTTTCACC |
| 3151 | AGTGAGACGG GCAACAGCTG ATTGCCCTTC ACCGCCTGGC |
| | CCTGAGAGAG |
| 3201 | TTGCAGCAAG CGGTCCACGC TGGTTTGCCC CAGCAGGCGA |
| | AAATCCTGTT |
| 3251 | TGATGGTGGT TAACGGCGGG ATATAACATG AGCTGTCTTC |
| | GGTATCGTCG |
| 3301 | TATCCCACTA CCGAGATATC CGCACCAACG CGCAGCCCGG |
| | ACTCGGTAAT |
| 3351 | GGCGCGCATT GCGCCCAGCG CCATCTGATC GTTGGCAACC |
| | AGCATCGCAG |
| 3401 | TGGGAACGAT GCCCTCATTC AGCATTTGCA TGGTTTGTTG |
| | AAAACCGGAC |
| 3451 | ATGGCACTCC AGTCGCCTTC CCGTTCCGCT ATCGGCTGAA |
| | TTTGATTGCG |
| 3501 | AGTGAGATAT TTATGCCAGC CAGCCAGACG CAGACGCGCC |
| | GAGACAGAAC |
| 3551 | TTAATGGGCC CGCTAACAGC GCGATTTGCT GGTGACCCAA |
| | TGCGACCAGA |
| 3601 | TGCTCCACGC CCAGTCGCGT ACCGTCTTCA TGGGAGAAAA |
| | TAATACTGTT |
| 3651 | GATGGGTGTC TGGTCAGAGA CATCAAGAAA TAACGCCGGA |
| | ACATTAGTGC |
| 3701 | AGGCAGCTTC CACAGCAATG GCATCCTGGT CATCCAGCGG |
| | ATAGTTAATG |
| 3751 | ATCAGCCCAC TGACGCGTTG CGCGAGAAGA TTGTGCACCG |
| | CCGCTTTACA |
| 3801 | GGCTTCGACG CCGCTTCGTT CTACCATCGA CACCACCACG |
| | CTGGCACCCA |
| 3851 | GTTGATCGGC GCGAGATTTA ATCGCCGCGA CAATTTGCGA |
| | CGGCGCGTGC |
| 3901 | AGGGCCAGAC TGGAGGTGGC AACGCCAATC AGCAACGACT |
| | GTTTGCCCGC |
| 3951 | CAGTTGTTGT GCCACGCGGT TGGGAATGTA ATTCAGCTCC |
| | GCCATCGCCG |
| 4001 | CTTCCACTTT TTCCCGCGTT TTCGCAGAAA CGTGGCTGGC |
| | CTGGTTCACC |
| 4051 | ACGCGGGAAA CGGTCTGATA AGAGACACCG GCATACTCTG |
| | CGACATCGTA |
| 4101 | TAACGTTACT GGTTTCACAT TCACCACCCT GAATTGACTC |
| | TCTTCCGGGC |
| 4151 | GCTATCATGC CATACCGCGA AAGGTTTTGC GCCATTCGAT |
| | GGTGTCCGGG |
| 4201 | ATCTCGACGC TCTCCCTTAT GCGACTCCTG CATTAGGAAG |
| | CAGCCCAGTA |
| 4251 | GTAGGTTGAG GCCGTTGAGC ACCGCCGCCG CAAGGAATGG |
| | TGCATGCAAG |
| 4301 | GAGATGGCGC CCAACAGTCC CCCGGCCACG GGGCCTGCCA |
| | CCATACCCAC |
| 4351 | GCCGAAACAA GCGCTCATGA GCCCGAAGTG GCGAGCCCGA |
| | TCTTCCCCAT |
| 4401 | CGGTGATGTC GGCGATATAG GCGCCAGCAA CCGCACCTGT |
| | GGCGCCGGTG |
| 4451 | ATGCCGGCCA CGATGCGTCC GGCGTAGAGG ATCGAGATCT |
| | CGATCCCGCG |
| 4501 | AAATTAATAC GACTCACTAT AGGGGAATTG TGAGCGGATA |
| | ACAATTCCCC |
| 4551 | TCTAGAAATA ATTTTGTTTA ACTTTAAGAA GGAGATATAC |
| | ATATGTTCCC |
| 4601 | GACCATTCCG TTATCCCGTC TTTTTGACAA CGCTATGCTC |
| | CGTGCCCATC |
| 4651 | GTCTGCACCA GCTGGCCTTT GACACCTACC AGGAGTTTGA |
| | AGAAGCCTAT |
| 4701 | ATCCCAAAGG AACAGAAGCA CTCATTCCTG CAGAACCCCC |
| | AGACCTCCCT |
| 4751 | CTGTTTCTCA GAGTCTATTC CGACACCCTC CAACAGGGAG |
| | GAAACACAAC |
| 4801 | AGAAATCCAA CCTAGAGCTG CTCCGCATCT CCCTGCTGCT |
| | CATCCAGTCG |
| 4851 | TGGCTGGAGC CCGTGCAGTT CCTCAGGAGT GTCTTCGCCA |
| | ACAGCCTGGT |
| 4901 | GTACGGCGCC TCTGACAGCA ACGTCTATGA CCTCCTAAAG |
| | GACCTAGAGG |
| 4951 | AAGGCATCCA AACGCTGATG GGGAGGCTGG AAGATGGCAG |
| | CCCCCGGACT |
| 5001 | GGGCAGATCT TCAAGCAGAC CTACAGCAAG TTCGACACAA |
| | ACTCACACAA |
| 5051 | CGATGACGCA CTACTCAAGA ACTACGGGCT GCTCTACTGC |
| | TTCAGGAAGG |
| 5101 | ACATGGACAA GGTCGAGACA TTCCTGCGCA TCGTGCAGTG |
| | CCGCTCTGTG |
| 5151 | GAGGGCAGCT GTGGCTTCTA AGGATCCGAA TTCGAGCTCC |
| | GTCGACAAGC |
| 5201 | TTGCGGCCGC ACTCGATGAG CAATAACTAG CATAACCCCT |
| | TGGGGCCTCT |
| 5251 | AAACGGGTCT TGAGGGGTTT TTTGCTGAAA GGAGGAA |

### Example 22

### Transport Kinetics of hGH(Y42I)

[0957] The cellular permeability of hGH(Y42I) was determined using a Caco-2 monolayer assay. Caco-2 is a human colorectal carcinoma cell line that forms a monolayer of differentiated epithelial cells joined by intercellular tight junctions. Because it forms a selective barrier for transcellular transport, the Caco-2 monolayer is commonly used as a model for human drug intestinal permeability. Typically, Caco-2 cells are seeded on a microporous membrane which is suspended in a well. With the monolayer in place, the well is divided into upper (apical) compartment and a lower (basolateral) compartment. To test absorption, the drug sample is applied to the apical compartment and withdrawn from the basolateral compartment at various time points. The apparent permeability coefficient (Pₐₚₚ) can then be calculated from the following equation:

$${P}_{app} ( cm \text{/} s ) = \frac{{V}_{A} \times {C}_{inf}}{dt \times {C}_{T = 0} \times A} \qquad$$

where V_{A} is the volume of the acceptor well, C_{inf} is the concentration of compound (i.e. drug) in the basolateral compartment after transport, A is the surface area (cm²) of the cell monolayer, and C_{T=0} is the concentration in the apical compartment before transport.

[0958] a. Permeability Experiments

[0959] In this Example, Caco-2 cells were maintained in Dulbecco's modified Eagle medium supplemented with 20% fetal bovine serum, glutamin and gentamicin. Cells were used between 22-28 passages (cells were typically passaged weekly). Cells were seeded at a density of 2×10⁵ cells per well on polycarbonate membrane inserts in 24-well Transwell™ plates (Costar) and used at days 21-23 post-seeding. The integrity of the cell monolayer was validated using TEER (transepithelial electrical resistance) testing wherein the movement of ions across the paracellular pathway is measured. Measurement of TEER across cells grown on permeable membranes provides an indirect assessment of tight junction establishment and stability.

[0960] Permeability experiments for hGH(Y42I) compared to native hGH were performed in the apical-basolateral direction (i.e. the concentration of hGH(Y42I) in the basolateral compartment was much lower that that of the apical compartment at the start of the assay). The concentration of hGH(Y42I) in the apical compartment at the start of the assay (C_{T=0}) was 75 μg/mL and the concentration in the basolateral compartment was ˜0. A pre-clinical batch of hGH(Y42I) prepared in accordance with condition #4 as described in Example 23 was used in the assay. The assay was performed in Ringer's buffer, pH 7.8, at 37° C. with shaking. Samples were withdrawn from the basolateral compartment at t=1 hour, 0.2 hours, 3 hours, 4 hours, 5 hours and 6 hours. The concentration of hGH(Y42I) and native hGH at each time point were determined using an hGH ELISA (Mediagnost®). Apparent permeability coefficients (Pₐₚₚ) were calculated for hGH(Y42I) and native hGH at each time point using the equation described above. Approximate Pₐₚₚ values are presented in Table 93:

TABLE 93

| | Pₐₚₚ hGH(Y42I) | Pₐₚₚ native hGH |
|---|---|---|
| Time (hour) | (cm/sec × 10⁸) | (cm/sec × 10⁸) |
| 1 | 0 | 0 |
| 2 | 0.05 | 0.02 |
| 3 | 0.18 | 0.06 |
| 4 | 0.20 | 0.19 |
| 5 | 0.30 | 0.29 |
| 6 | 0.35 | 0.30 |

[0961] In a separate experiment, Pₐₚₚ values were determined for various starting concentrations of hGH(Y42I) or native hGH in the apical compartment (C_{T=0}) after 6 hours total transport time. Approximate Pₐₚₚ values are presented in Table 94 below.

TABLE 94

| C_{T=0} | Pₐₚₚ hGH(Y42I) | Pₐₚₚ native hGH |
|---|---|---|
| (μg/ml) | (cm/sec × 10⁸) | (cm/sec × 10⁸) |
| 5 | 0.30 | 0.25 |
| 10 | 0.20 | 0.25 |
| 30 | 0.25 | 0.30 |
| 50 | 0.40 | 0.60 |
| 100 | 1.10 | 1.10 |
| 140 | — | 0.90 |
| 150 | 0.90 | — |
| 200 | 0.90 | — |
| 230 | — | 1.10 |
| 260 | 0.90 | — |
| 270 | — | 0.80 |

[0962] As shown in Tables 93 and 94 above, hGH(Y42I) and native hGH show comparable transport kinetics through monolayers of Caco-2 cells.

[0963] b. Immunofluorescence Experiments

[0964] In order to visualize transport of hGH(Y42I) across Caco-2 cells, immunoflourescence experiments were performed. For these experiments, Caco-2 cells were seeded at a density of 2×10⁵ cells per well on polyester (PET) membrane inserts in 24-well Transwell™ plates (Costar) and used at days 21-23 post-seeding. The permeability assay was conducted as described above except that the starting concentration of hGH(Y42I) in the apical compartment was 300 μg/mL.

[0965] After six hours of membrane transport, the cells were fixed in 4% phosphate buffer with sucrose containing 4% formaldehyde for 15 minutes at room temperature. Cells were washed with PBS and stored at 4° C. until staining.

[0966] Prior to staining, cells were permeabilized for antibody penetration according to the following method: 1) cells were incubated for 10 minutes at room temperature in TBS containing 1% BSA and 0.1% Triton X-100; 2) cells were washed three times in 1×TBS; and 3) cells were incubated in 1×TBS containing 1% BSA for 2 hours at room temperature.

[0967] Cells were stained for: hGH(Y42I), actin (apical membrane marker), transferrin receptor (basal membrane marker) and occludin (tight junction marker). Staining of hGH(Y42I) and cellular markers was performed for 1 hour at room temperature using goat anti-hGH (T20) antibody (Santa Cruz; 10365) at a dilution of 1:50 (for staining of hGH(Y42I)); phalloidin Alexa-568 molecular probe (A12380) at a dilution of 1:200 (for actin staining); mouse anti-transferrin receptor (Zymed; 136800) at a dilution of 1:500 (for transferrin receptor staining); or mouse anti-occludin FITC antibody (Zymed; 33-1511) at a dilution of 1:250 (for occluding staining). Cell monolayers were cut in 50 μl of Vectashield® Mounting Medium with Dapi solution (Vector Laboratories) and cell staining was observed using confocal microscopy. The results showed no difference in fluorescence between native hGH and hGH(Y42I). This supports the results described above that hGH(Y42I) and native hGH show comparable transport kinetics through monolayers of Caco-2 cells.

### Example 23

### hGH(Y42I) Drug Product Development Studies for Pre-Clinical and Clinical Use

[0968] Using methods of production analogous to those described for IFN-α-2b(E41Q) herein, a liquid bulk solution containing hGH(Y42I) protein was generated for use in pre-clinical and clinical studies. Several exemplary buffer conditions for lyophilization were tested and the data from these tests are presented below. The lyophilized powder generated from the selected condition was used to manufacture hGH(Y42I) enteric-coated caplets and tablets. Exemplary drug formulations are presented below.

[0969] 1. Selection of Lyophilization Conditions

[0970] Prior to lyophilization of the liquid bulk for manufacture of enteric-coated caplets and tablets, it was necessary to test several buffer conditions of the liquid bulk in order to generate an optimal powder substance for the capsule and tablet formulations. Six exemplary buffer conditions are presented in Table 95 below. Samples of hGH(Y42I) protein obtained purified liquid bulk preparation of E. coli-expressed hGH(Y42I) protein were formulated in the six different buffers. Concentrations of buffer components presented in Table 95 represent the final buffer concentrations prior to lyophilization.

TABLE 95
Lyophilization buffer conditions

| Condition | Buffer Formulation |
|---|---|
| Condition 1 | 20 g/L Mannitol + 1 g/L NaCl + 7.5 mM Na₂HPO₄/ |
| | NaH₂PO₄, pH 7.5 |
| Condition 2 | 2 g/L Mannitol + 15 mM Na₂HPO₄/NaH₂PO₄, pH 7.5 |
| Condition 3 | 7.5 g/L Sucrose + 2 mM H₃PO₄/NaOH, pH 6.5 |
| Condition 4 | 6 g/L Sucrose + 7.5 g/L NaCl + 20 mM Na₂HPO₄/ |
| | NaH₂PO₄, pH 7.5 |
| Condition 5 | 6 g/L Sucrose + 20 mM Na₂HPO₄/NaH₂PO₄, pH 7.5 |
| Condition 6 | 6 g/L Sucrose + 8.5 g/L arginine + 20 mM Na₂HPO₄/ |
| | NaH₂PO₄, pH 7.5 |

[0971] The activity, percent yield and percent dimerization of hGH(Y42I) were analyzed for each liquid sample prior to lyophilization. The activity was determined using the hGH cell proliferation assay described in Example 1. SE-HPLC was used for the monomer/dimer determination. All conditions were deemed acceptable for lyophilization according the parameters tested. The results are presented in Table 96:

TABLE 96
Activity, yield, and dimer formation in tested buffers

| | Activity | | |
|---|---|---|---|
| Sample | (EC₅₀, pg/mL) | Yield (%) | Dimer (%) |
| Initial Sample | 83.54 | n/a | 5.92 |
| Condition 1 | 63.26 | 86.74 | 10.23 |
| Condition 2 | 78.82 | 87.11 | 4.40 |
| Condition 3 | 63.32 | 95.03 | 5.49 |
| Condition 4 | 72.84 | 91.55 | 7.46 |
| Condition 5 | 70.45 | 94.65 | 8.83 |
| Condition 6 | 69.69 | 88.98 | 10.23 |
| NIBSC | 101.59 | n/a | n/a |

[0972] The samples were lyophilized using procedures analogous to those described for IFN-α-2b(E41Q). Following lyophilization, the appearance of the powder was analyzed for each condition. The results of the analysis are presented Table 97 below.

TABLE 97
Lyophilized powder quality

| Sample | Appearance of Powder |
|---|---|
| Condition 1 | Voluminous; Very lumpy; Marginal adherence to wall of |
| | vial |
| Condition 2 | Fine; Lumpy; Adherence to wall and spatula |
| Condition 3 | More voluminous than condition 4; Very lumpy; No |
| | adherence to wall or spatula |
| Condition 4 | Very fine; Not lumpy; Marginal adherence to wall of vial |
| Condition 5 | More voluminous than condition 4; Marginal lumpiness; |
| | Marginal adherence to wall and spatula |
| Condition 6 | Marginally voluminous; Not lumpy; Very adherent to wall |
| | and spatula |

[0973] Based on the physical behavior (i.e., stickiness) of the powder, conditions 2 and 6 were eliminated and conditions 1, 3, 4 and 5 were chosen for further analysis. Following the physical analysis, samples of the lyophilized powder were resuspended and analyzed for activity (by hGH cell proliferation assay), yield (determined by OD₂₈₀ and bicinchoninic acid (BCA) assays) and percent dimerization (by SE-HPLC). The results of these analyses are presented in Table 98 below.

TABLE 98
Activity, yield and dimer data for lyophilized samples

| | | Yield | | | |
|---|---|---|---|---|---|
| | Activity | | | BCA/OD₂₈₀ | |
| | (EC₅₀, | | BCA | (% | |
| Sample | pg/mL) | OD₂₈₀ | (mg/mL) | variance) | Dimer (%) |
| Condition 1 | 188.72 | 0.346 | 0.527 | 34 | 9.97 |
| Condition 2 | 140.97 | 0.296 | n/a* | n/a* | 7.19 |
| Condition 3 | 137.93 | 0.277 | 0.479 | 42 | 6.94 |
| Condition 4 | 121.67 | 0.325 | 0.550 | 41 | 6.72 |
| Condition 5 | 135.96 | 0.282 | 0.510 | 45 | 10.05 |
| Condition 6 | 151.37 | 0.230 | n/a* | n/a* | 10.88 |
| NIBSC | 144.7 | n/a | n/a | n/a | n/a |

*Since condition 2 and condition 6 were eliminated from further consideration, BCA assays were not performed on these samples

[0974] 2. Addition of Chromatography Purification Step

[0975] In a second experiment, a column purification step was added to the lyophilization process prior to the lyophilization step in order to determine the degree of purity that can be achieved with each buffer condition. Samples of hGH(Y42I) protein were prepared as described above in 23.1 using the specified buffer for conditions 1, 3, 4 and 5. The liquid bulk (prior to lyophilization) was purified by size exclusion chromatography (SEC) using Sephacryl S100 columns. Prior to addition of the samples, the columns were equilibrated with the appropriate buffer (without the sugar) for each condition. The protein samples were then loaded, washed and eluted. The elution fractions for each sample were analyzed for yield and purity (determined by peak resolution in mass spectrophotometry (mass spec) analysis). Samples for conditions 1, 4, and 5 exhibited good resolution of the hGH peak when analyzed with mass spec. The sample for condition 3 was found to have poor peak resolution. The results of the analysis are presented in Table 99 below.

TABLE 99
SEC yields and resolution quality

| Sample | Yield (%) | Resolution Quality |
|---|---|---|
| Condition 1 | 82.6 | Good |
| Condition 3 | 78.2 | Poor |
| Condition 4 | 77 | Good |
| Condition 5 | 77.8 | Good |

[0976] Following SEC purification, the liquid bulk samples from conditions 1, 3, 4 and 5 were lyophilized as described above. The amount of hGH(Y42I) protein per mg of powder was determined from OD₂₈₀ and BCA measurements. In addition, the maximum amount of powder that could be loaded into a size 9 capsule was measured. Based on these amounts (mg of protein per mg of powder and mg of powder per capsule) the maximum amount of hGH(Y42I) protein that could be contained in a capsule was calculated for each of the four selected conditions. This data is presented in Table 100 below. A summary of the data collected during lyophilization optimization also is presented in Table 100, including powder appearance, hGH(Y42I) activity after lyophilization, % dimerization of hGH(Y42I) before and after lyophilization, and resolution quality of the mass spec peaks after SEC purification.

TABLE 100
Summary of SEC purified lyophilized samples

| | | | | OD₂₈₀ | | | |
|---|---|---|---|---|---|---|---|
| | | Activity | | BCA | Mg | | |
| | Powder | (EC₅₀, | | (mg hGH/ | powder/ | Mg hGH/ | SEC |
| Sample | Appearance | pg/mL) | Dimer (%) | mg powder) | Capsule | Capsule | Purification |
| Condition | Good | 188.72 | Before 10.23 | OD: 0.027 | 22.3 | 0.594 | Good |
| 1 | | | After 9.97 | BCA: 0.041 | | | resolution |
| Condition | Sticky | 140.97 | Before 4.4 | n/a | n/a | n/a | n/a |
| 2 | | | After 7.19 | | | | |
| Condition | Good | 137.93 | Before 5.49 | OD: 0.057 | 26.2 | 1.508 | Good |
| 3 | | | After 6.94 | BCA: 0.099 | | | resolution |
| Condition | Good | 121.67 | Before 7.46 | OD: 0.033 | 36.6 | 1.227 | Good |
| 4 | | | After 6.72 | BCA: 0.057 | | | resolution |
| Condition | Good | 135.96 | Before 8.83 | OD: 0.057 | 24.6 | 1.398 | Good |
| 5 | | | After 10.05 | BCA: 0.103 | | | resolution |
| Condition | Sticky | 151.37 | Before 10.23 | n/a | n/a | n/a | n/a |
| 6 | | | After 10.88 | | | | |
| NIBSC | n/a | 144.76 | n/a | n/a | n/a | n/a | n/a |

[0977] As a result of these studies, condition 4 was selected for further drug product formulation of hGH(Y42I) based on its good peak resolution and low dimer percentage.

### Example 24

### Normal Versus Low Moisture Formulation of hGH(Y42I) Tablets

[0978] For the tablet formulations of hGH(Y42I), the effect of moisture content on the stability of hGH(Y42I) was examined. Two exemplary hGH(Y42I) tablet formulations, referred to herein as normal and low moisture, were manufactured and tested. The formulations were produced by separate manufacturers. The specifications for these two formulations are presented in Table 101 below.

TABLE 101
Low versus Normal moisture tablet formulations

| | Moisture | Normal | Low Moisture |
|---|---|---|---|
| | Content (%) | Formulation | Formulation |
| Formulation | | | |
| hGH(Y42I) Powder | — | 8.7 | 8.7 |
| Lactose Monohydrate | 4.5-5.5 | 68.5 | — |
| DCL 11 | | | |
| Pharmatose DCL 22 | — | — | 67.9 |
| Avicel PH102 | <5.0 | 18 | — |
| Avicel PH112 | <1.5 | — | 16.8 |
| Povidone K25 | 10.0-15.0 | 1.2 | — |
| Crosspovidone XL | <5.0 | 2.4 | — |
| Crosscarmellose Sodium | <10 | — | 3.0 |
| Pearitol 200 SD | <1.0 | — | 2.0 |
| Glycine | — | — | 0.4 |
| Stearic Acid | — | — | 1.2 |
| Magnesium Stearate | — | 1.2 | — |
| Total | | 100.0 | 100.0 |
| Process Steps | | | |
| 1 | | Dry Blending | Dry Blending |
| 2 | | Compression | Compression |
| 3 | | — | Cooling and |
| | | | Drying |
| 4 | | Enteric Coating | Sub-coating + |
| | | | Enteric Coating |
| Tooling used | | 11.00 mm × | 11.00 mm × |
| | | 4.40 | 4.40 |
| | | mm capsule | mm capsule |
| | | shape tooling | shape tooling |
| PH of Excipient Blend | | 6.676 | 6.415 |
| (10% solution) | | | |
| Tablet Characteristics | | | |
| Tablet Weight (mg) | | 150 ± 3 | 150 ± 3 |
| Tablet Thickness (mm) | | 3.11-3.17 | 3.16-3.25 |
| Tablet Hardness (KP) | | 6.7 | 6.9 |
| Average Compression | | 140 bar | 120 bar |
| Force | | | |
| Disintegration Time as | | | |
| per USP (701) for | | | |
| Delayed | | | |
| Release Tablets | | | |
| (min.: sec.) | | | |
| Enteric-coated Tablets | | 10:47 | 12:09 |
| Coating Parameters | | | |
| Inlet Air Temperature | | 34-36 | 34-36 |
| ° C. | | | |
| Product Temperature | | 26-28 | 26-28 |
| ° C. | | | |
| Weight Gain (%) | | | |
| Sub-coating with Opadry | | — | 2.7 |
| Clear | | | |
| Enteric Coating with | | 13.0 | 13.4 |
| Acryl EZE | | | |

[0979] Stability analysis was performed on normal (normal WC) and low moisture (low WC) formulation tablets in a climactic chamber (30° C./60% relative humidity (RH) and 45° C./75% RH). Monomer/dimer determination (SE-HPLC) and activity (hGH cell proliferation assay) data was collected at each time point. The results of the tests are presented in Table 102 below. Based on this study, the low moisture formulation was chosen for the manufacture of the hGH(Y42I) tablets.

TABLE 102
Stability analysis for low versus normal moisture content

| | | | | | Proliferation | |
|---|---|---|---|---|---|---|
| | | | | | Activity | |
| Formu- | | Length | | Dimer | (EC₅₀, pg/mL) | |
| lation | Time | (Week) | Condition | % | Tablet | NIBSC |
| low WC | T0 | 0 | RT | 3.2 | 89.7 | 128.8 |
| normal | T0 | 0 | RT | 4.18 | 95.8 | 128.8 |
| WC | | | | | | |
| low | T1 | 4 | 30° C. 60% RH | 5 | 238 | 126.8 |
| WC | | | 45° C. 75% RH | 6.72 | 290 | 126.8 |
| normal | T1 | 4 | 30° C. 60% RH | 6.42 | 280.3 | 126.8 |
| WC | | | 45° C. 75% RH | 8.6 | 269.8 | 126.8 |
| low WC | T2 | 6 | 30° C. 60% RH | 7.79 | 97.1 | 89.4 |
| | | | 45° C. 75% RH | 9.51 | 208.3 | 89.4 |
| normal | T2 | 6 | 30° C. 60% RH | 19.12 | 485.5 | 89.4 |
| WC | | | 45° C. 75% RH | 17.26 | 351 | 89.4 |

### Example 25

### Exemplary Capsule and Tablet Formulations of hGH(Y42I)

[0980] 1. Enteric-Coated Capsules

[0981] Enteric-coated capsules for use in pre-clinical rat studies were filled with the appropriate amount of lyophilized hGH(Y42I). Filler weight was completed with sucrose. The capsules were enteric-coated (to maintain their integrity at acidic pH) to deliver the product into the intestine (soluble at neutral pH). Clear Torpac (size 9, batch # 1684) and Opaque Capsugel capsules (size 9, batch # 1402) were used for PK rat studies.

[0982] The enteric coating was comprised of 3 layers of a solution containing cellulose/acetate/phatalate in acetone (12.5% m/v). Each layer was dried separately. The quality of the enteric coating was evaluated by exposure to pH 1.2 for 1 h at 37° C., with stirring followed by a full dissolution in PBS at 37° C. This procedure was then applied to the different dose strength enteric-coated capsules used in pre-clinical studies. All tested enteric-coated capsules showed no visual leaks during the 1 h exposure. The transfer into PBS elicited disintegration of the enteric-coated capsule within 30 min.

[0983] 2. Enteric-Coated Tablets

[0984] Exemplary formulations for enteric coated hGH(Y42I) tablets are presented in Table 103 below.

TABLE 103
hGH(Y42I) Enteric-coated Tablet Formulation

| | 3.0 mg | | 12.0 mg | | 24.0 mg | |
|---|---|---|---|---|---|---|
| Ingredients | strength | | strength | | strength | |
| hGH(Y42I) Lyophilized Powder | 21.75 | mg | 87.0 | mg | 174.0 | mg |
| Pearlitol 200 SD | 15.0 | mg | 60.0 | mg | 120.0 | mg |
| Glycine | 3.0 | mg | 12.0 | mg | 24.0 | mg |
| Pharmatose DCL 22 | 172.125 | | 112.5 | mg | 33.0 | mg |
| Avicel 112 | 172.125 | | 112.5 | mg | 33.0 | mg |
| Croscarmellose Sodium | 12.0 | mg | 12.0 | mg | 12.0 | mg |
| Stearic Acid | 4.0 | mg | 4.0 | mg | 4.0 | mg |
| Total Tablet Weight | 400.0 | mg | 400.0 | mg | 400.0 | mg |

### Example 26

### Pharmacokinetic (PK) Profiles of Exemplary hGH Protease-Resistant Mutants Intraduodenal Versus Subcutaneous Administration

[0985] The pharmacokinetic (PK) profile following a single intraduodenal (ID) administration or subcutaneous injection of either native hGH protein or one of several hGH protease-resistant variants was compared. The hGH variants used in this study are referred to by the following variant numbers (the corresponding hGH mutation is shown in parentheses): variant 15 (D11N), variant 18 (M14V), variant 27 (L231), variant 28 (L23V), variant 57 (Y42H), variant 58 (Y42I), variant 100 (L81V), variant 143 (E119Q) and variant 148 (M125I). The study involved 120 8-week old Sprague-Dawley male rats (20 groups of 6 animals) and was conducted in two parts: 1) ID administration and 2) subcutaneous injection.

[0986] 1. Part I: Intraduodenal Dosing

[0987] For the ID administration, 2 mg per animal of a liquid formulation (1 mL/animal volume) of native hGH or variant hGH (15, 18, 27, 28, 58, 57, 100, 143 or 148) was administered to 8-week old pathogen free Sprague-Dawley rats via an intraduodenal catheter. Blood samples were taken from all the animals for determination of plasma levels of native hGH protein and hGH variants 15, 18, 27, 28, 58, 57, 100, 143 and 148 (pharmacokinetic studies) in rat serum.

[0988] The treatment groups (10 groups of 6 male rats including a control group) established for the study are presented in Table 104:

TABLE 104
Dosage and experimental detail for ID study

| Group | | | Dose and | |
|---|---|---|---|---|
| number | Number of animals | Treatment | volume | |
| 1 | 6 males (1 to 6) | Native hGH | 2 | mg |
| | | | 1 | ml |
| 2 | 6 males (7 to 12) | hGH variant 15 | 2 | mg |
| | | | 1 | ml |
| 3 | 6 males (13 to 18) | hGH variant 18 | 2 | mg |
| | | | 1 | ml |
| 4 | 6 males (19 to 24) | hGH variant 27 | 2 | mg |
| | | | 1 | ml |
| 5 | 6 males (25 to 30) | hGH variant 28 | 2 | mg |
| | | | 1 | ml |
| 6 | 6 males (31 to 36) | hGH variant 58 | 2 | mg |
| | | | 1 | ml |
| 7 | 6 males (37 to 42) | hGH variant 57 | 2 | mg |
| | | | 1 | ml |
| 8 | 6 males (43 to 48) | hGH variant 100 | 2 | mg |
| | | | 1 | ml |
| 9 | 6 males (49 to 54) | hGH variant 143 | 2 | mg |
| | | | 1 | ml |
| 10 | 6 males (55 to 60) | hGH variant 148 | 2 | mg |
| | | | 1 | ml |

[0989] Blood samples were drawn on administration day 1 for each group immediately before administration and at 0.5, 1, 2, 4 and 8 hours after administration. At each time-point, a blood sample (200 μl) was taken via a jugular vein catheter and placed in an ice-cold collection tube containing lithium-heparin and was gently mixed. 30 μl of anti-protease solution was immediately added. Tubes were kept in ice (within 30 minutes of collection) and centrifuged at 2000×g for 10 minutes at 4° C. Plasma was harvested in 3 tubes of at least 40 μl each and kept frozen at −20° C. or −80° C. until assayed for presence of hGH.

[0990] The amount of remaining hGH in animal plasma at each time point was determined using an anti-hGH ELISA kit (Roche Diagnostics GmbH, reference n^{o}11585 878 001), according to the manufacturer's protocol. Human hGH ELISA Kit results were expressed in pg/ml after extrapolation from the standard curve of OD values measured with a spectrophotometer at 405 nm. Using PK solution software (SummitPK, Montrose, Colo., USA), PK parameters including Tₘₐₓ, Cₘₐₓ, half-life and AUC were determined for each pharmacokinetic profile. PK parameters calculated from the average of animal PK profiles obtained following ID liquid formulation administration of hGH variants and native hGH protein are presented in Table 105.

TABLE 105
PK parameters for ID administration

| Intraduodenal | Cₘₐₓ | AUC₍₀₋ₜ₎ | Tₘₐₓ |
|---|---|---|---|
| (2 mg/animals) | (ng/ml) | (h-ng/ml) | (h) |
| Variant 15 | 431.4 | 1548.7 | 0.5 |
| Variant 18 | 367.6 | 1281.6 | 0.5 |
| Variant 27 | 313.1 | 720.4 | 0.5 |
| Variant 28 | 363.3 | 1278.3 | 0.5 |
| Variant 57 | 361.3 | 1363.3 | 1 |
| Variant 58 | 223.0 | 983.8 | 0.5 |
| Variant 100 | 289.9 | 1067.0 | 0.5 |
| Variant 143 | 274.7 | 575.0 | 1 |
| Variant 148 | 266.8 | 1079.0 | 2 |
| Native hGH | 22.3 | 16.2 | 0.5 |

[0991] All protease-resistant hGH variants tested exhibited significantly improved pharmacokinetic profiles compared to native hGH per intraduodenal administration. For example, the variants exhibited Cₘₐₓ values that were 12 to 20 times that of native hGH and AUC values that range from 35 to 96 times that of native hGH. Similar to results observe for other protease-resistant polypeptides, such as IFN-α-2b(E41Q) described in the Examples above, protease resistant variants of hGH exhibit PK profiles that suggest a sustained delivery of the protease-resistant polypeptide from the intestinal compartment to the systemic circulation most likely due to a slow absorption coupled with decreased susceptibility to intestinal protease degradation.

[0992] 2. Part II: Subcutaneous Dosing

[0993] For the subcutaneous administration, 50 μg per animal of native hGH or variant hGH (15, 18, 27, 28, 58, 57, 100, 143 or 148) in a volume of 0.5 mL per animal was administered via the subcutaneous route into 8-week old pathogen free Sprague-Dawley rats. Blood samples were taken from all the animals for determination of plasma levels of native hGH protein and hGH variants 15, 18, 27, 28, 58, 57, 100, 143 and 148 (pharmacokinetic studies) in rat serum.

[0994] The treatment groups (10 groups of 6 male rats including a control group) established for the study are presented in Table 106:

TABLE 106
Dosage and experimental detail for SC study

| Group | | | Dose and | |
|---|---|---|---|---|
| number | Number of animals | Treatment | volume | |
| 11 | 6 males (61 to 66) | Native hGH | 50 | μg |
| | | | 0.5 | ml |
| 12 | 6 males (67 to 72) | hGH variant 15 | 50 | μg |
| | | | 0.5 | ml |
| 13 | 6 males (73 to 78) | hGH variant 18 | 50 | μg |
| | | | 0.5 | ml |
| 14 | 6 males (79 to 84) | hGH variant 27 | 50 | μg |
| | | | 0.5 | ml |
| 15 | 6 males (85 to 90) | hGH variant 28 | 50 | μg |
| | | | 0.5 | ml |
| 16 | 6 males (91 to 96) | hGH variant 58 | 50 | μg |
| | | | 0.5 | ml |
| 17 | 6 males (97 to 102) | hGH variant 57 | 50 | μg |
| | | | 0.5 | ml |
| 18 | 6 males (103 to 108) | hGH variant 100 | 50 | μg |
| | | | 0.5 | ml |
| 19 | 6 males (109 to 114) | hGH variant 143 | 50 | μg |
| | | | 0.5 | ml |
| 20 | 6 males (115 to 120) | hGH variant 148 | 50 | μg |
| | | | 0.5 | ml |

[0995] Blood samples were drawn on administration day 1 for each group immediately before administration and at 0.5, 1, 2, 4 and 8 hours after administration. At each time-point, a blood sample (200 μl) was taken via a jugular vein catheter and placed in an ice-cold collection tube containing lithium-heparin and was gently mixed. 30 μl of anti-protease solution was immediately added. Tubes were kept in ice (within 30 minutes of collection) and centrifuged at 2000 g for 10 minutes at 4° C. Plasma was harvested in 3 tubes of at least 40 μl each and kept frozen at −20° C. or −80° C. until assayed for the presence of hGH.

[0996] The amount of remaining hGH in animal plasma at each time point was determined using an anti-hGH ELISA kit (Roche Diagnostics GmbH, reference n^{o}11585 878 001), according to the manufacturer's protocol. Human hGH ELISA Kit results were expressed in pg/ml after extrapolation from the standard curve of OD values measured with a spectrophotometer at 405 nm. Using PK solution software (SummitPK, Montrose, Colo., USA), PK parameters including Tₘₐₓ, Cₘₐₓ, half-life and AUC were determined for each pharmacokinetic profile. PK parameters calculated from the average of animal PK profiles obtained following subcutaneous administration of hGH variants and native hGH protein are presented in Table 107.

TABLE 107
PK parameters for SC administration

| Subcutaneous | Cₘₐₓ | AUC₍₀₋ₜ₎ | Tₘₐₓ |
|---|---|---|---|
| (50 μg/animals) | (ng/ml) | (h-ng/ml) | (h) |
| Variant 15 | 355.6 | 2204.6 | 2 |
| Variant 18 | 353.5 | 2494.3 | 1 |
| Variant 27 | 370.9 | 1917.3 | 1 |
| Variant 28 | 417.6 | 2335.8 | 1 |
| Variant 57 | 433.6 | 2609.3 | 1 |
| Variant 58 | 277.6 | 1845.2 | 1 |
| Variant 100 | 329.5 | 1785.8 | 1 |
| Variant 143 | 321.6 | 2066.9 | 1 |
| Variant 148 | 322.0 | 2144.4 | 2 |
| Native hGH | 362.4 | 205.1 | 0.5 |

[0997] Similar to the results observed for the ID administration, all protease-resistant hGH variants tested exhibited significantly improved pharmacokinetic profiles compared to native hGH per subcutaneous administration. For example, the variants exhibited AUC values that range from 8 to 12 times that of native hGH.

### Example 27

### In Vivo Pharmacokinetic (PK) Study of hGH(Y42I) and hGH(Y42H) in Normal Rats Compared to Native hGH Following Per Os (PO) and IV Administrations

[0998] Pharmacokinetic studies were performed on 8-week old Sprague-Dawley male rats to compare per os (PO, liquid gavage and capsule formulations) and intravenous (IV) routes of administration. The objective of this study was to investigate the PK profile and calculate the bioavailability of hGH variant 57 (Y42H) and hGH variant 58 (Y42I). The study involved 120 Sprague-Dawley male rats (24 groups of 5 animals) and was conducted in two parts: 1) per os for liquid and capsule formulations and 2) intravenous injection.

[0999] 1. hGH Formulations

[1000] Preparations of native hGH and hGH variants used are set forth in Tables 108(a-k).

TABLE 108a
hGH WT Batch # hGH-004/06
(Group 1)

| | |
|---|---|
| Date of manufacture | June 2006 |
| Expiry date | December 2006 |
| Correspondence MIU vs mg | 171 MIU = 1 mg |
| Presentation | 65 mL of a WT hGH solution in: |
| | 7.5 mg/mL NaCl, |
| | 6 mg/mL sucrose, |
| | 2.38 mg/mL sodium phosphate dibasic, |
| | 0.44 mg/mL sodium phosphate monobasic |
| Administration | Per os |

TABLE 108b
hGH WT Batch # hGH-004/06
(Group 13: 2 capsules)

| | |
|---|---|
| Date of manufacture | June 2006 |
| Expiry date | December 2006 |
| Correspondence MIU vs mg | 171 MIU = 1 mg |
| Presentation | Capsules containing 0.6 mg of lyophilized |
| | WT hGH prepared in (prior to |
| | lyophilization): |
| | 7.5 mg/mL NaCl, |
| | 6 mg/mL sucrose, |
| | 2.38 mg/mL sodium phosphate dibasic, |
| | 0.44 mg/mL sodium phosphate monobasic |
| Administration | Per os |

TABLE 108c
hGH WT Batch # hGH-004/06
(Group 10, 22)

| | |
|---|---|
| Date of manufacture | June 2006 |
| Expiry date | December 2006 |
| Correspondence MIU vs mg | 171 MIU = 1 mg |
| Presentation | Sterile solution at 100 μg/mL |
| | Preparation: |
| | 13.13 mL of WT hGH solution in |
| | 7.5 mg/mL NaCl, |
| | 6 mg/mL sucrose, |
| | 2.38 mg/mL sodium phosphate dibasic, |
| | 0.44 mg/mL sodium phosphate monobasic |
| | added to 51.87 mL of PBS |
| Administration | Intravenous route |

TABLE 108d
hGH(Y42I) Batch # hGH-003/06
(0.3 mg/mL PO gavage (Group 8) and 0.15 mg/mL PO gavage (Group 9))

| | |
|---|---|
| Date of manufacture | June 2006 |
| Expiry date | December 2006 |
| Correspondence MIU vs mg | 138 MIU = 1 mg |
| Presentation | Preparation (0.3 mg/mL): |
| | 35.9 mL of hGH Lead 58 solution in |
| | 7.5 mg/mL NaCl, |
| | 6 mg/mL sucrose, |
| | 2.38 mg/mL sodium phosphate dibasic, |
| | 0.44 mg/mL sodium phosphate monobasic |
| | added to 29.1 mL of PBS |
| | Preparation (0.15 mg/mL): |
| | 18 mL of hGH Lead 58 solution in |
| | 7.5 mg/mL NaCl, |
| | 6 mg/mL sucrose, |
| | 2.38 mg/mL sodium phosphate dibasic, |
| | 0.44 mg/mL sodium phosphate monobasic |
| | added to 47 mL of PBS |
| Administration | Per os |

TABLE 108e
hGH(Y42I) Batch # hGH-003/06
(0.6 mg/capsule (Groups 18, 19), 0.3 mg/capsule (Group 20),
0.15 mg/capsule (Group 21))

| | |
|---|---|
| Date of manufacture | June 2006 |
| Expiry date | December 2006 |
| Correspondence MIU vs mg | 138 MIU = 1 mg |
| Presentation | Capsules containing 0.6, 0.3 and 0.15 mg |
| | of hGH Lead 58 solution in |
| | 7.5 mg/mL NaCl, |
| | 6 mg/mL sucrose, |
| | 2.38 mg/mL sodium phosphate dibasic, |
| | 0.44 mg/mL sodium phosphate monobasic |
| Administration | Per os |

TABLE 108f
hGH(Y42I) Batch # hGH-003/06
(1.2 mg/mL PO gavage (Group 6) and 0.6 mg/mL PO gavage (Group 7))

| | |
|---|---|
| Date of manufacture | June 2006 |
| Expiry date | December 2006 |
| Correspondence MIU vs mg | 138 MIU = 1 mg |
| Presentation | Preparation (1.2 mg/mL): |
| | 47 mL of hGH Lead 58 solution in |
| | 7.5 mg/mL NaCl, |
| | 6 mg/mL sucrose, |
| | 2.38 mg/mL sodium phosphate dibasic, |
| | 0.44 mg/mL sodium phosphate monobasic |
| | added to 18 mL of PBS |
| | Preparation (0.6 mg/mL): |
| | 23.5 mL of hGH Lead 58 solution in |
| | 7.5 mg/mL NaCl, |
| | 6 mg/mL sucrose, |
| | 2.38 mg/mL sodium phosphate dibasic, |
| | 0.44 mg/mL sodium phosphate monobasic |
| | added to 41.5 mL of PBS |
| Administration | Per os |

TABLE 108g
hGH(Y42I) Batch # hGH-003/06
(Group 12, 24)

| | |
|---|---|
| Date of manufacture | June 2006 |
| Expiry date | December 2006 |
| Correspondence MIU vs mg | 138 MIU = 1 mg |
| Presentation | Sterile solution at 100 μg/mL |
| | Preparation: |
| | 13.57 mL of hGH Lead 58 solution in |
| | 7.5 mg/mL NaCl, |
| | 6 mg/mL sucrose, |
| | 2.38 mg/mL sodium phosphate dibasic, |
| | 0.44 mg/mL sodium phosphate monobasic |
| | added to 51.43 mL of PBS |
| Administration | Intravenous route |

TABLE 108h
hGH(Y42H) Batch # hGH57-002/06
(0.3 mg/mL PO gavage (Group 4) and 0.15 mg/mL PO gavage (Group 5))

| | |
|---|---|
| Date of manufacture | May 2006 |
| Expiry date | November 2006 |
| Correspondence MIU vs mg | 141 MIU = 1 mg |
| Presentation | Preparation (0.3 mg/mL): 41.6 mL of hGH |
| | Lead 58 solution in |
| | 7.5 mg/mL NaCl, |
| | 6 mg/mL sucrose, |
| | 2.38 mg/mL sodium phosphate dibasic, |
| | 0.44 mg/mL sodium phosphate monobasic |
| | added to 23.4 mL of PBS |
| | Preparation (0.15 mg/mL): 20.8 mL of |
| | hGH Lead 58 solution in |
| | 7.5 mg/mL NaCl, |
| | 6 mg/mL sucrose, |
| | 2.38 mg/mL sodium phosphate dibasic, |
| | 0.44 mg/mL sodium phosphate monobasic |
| | added to 44.2 mL of PBS |
| Administration | Per os |

TABLE 108i
hGH(Y42H) Batch # hGH57-002/06
(0.6 mg/capsule (Group 14, 15), 0.3 mg/capsule (Group 16),
0.15 mg/capsule
(Group 17))

| | |
|---|---|
| Date of manufacture | May 2006 |
| Expiry date | November 2006 |
| Correspondence MIU vs mg | 141 MIU = 1 mg |
| Presentation | Capsules containing 0.6, 0.3 and 0.15 mg |
| | of hGH Lead 58 solution in |
| | 7.5 mg/mL NaCl, |
| | 6 mg/mL sucrose, |
| | 2.38 mg/mL sodium phosphate dibasic, |
| | 0.44 mg/mL sodium phosphate monobasic |
| Administration | Per os |

TABLE 108j
hGH(Y42H) Batch # hGH57-002/06
(1.2 mg/mL PO gavage (Group 2) and 0.6 mg/mL PO gavage (Group3))

| | |
|---|---|
| Date of manufacture | May 2006 |
| Expiry date | November 2006 |
| Correspondence | 141 MIU = 1 mg |
| MIU vs mg | |
| Presentation | Preparation (1.2 mg/mL): 45.9 mL of hGH Lead 58 |
| | solution in |
| | 7.5 mg/mL NaCl, |
| | 6 mg/mL sucrose, |
| | 2.38 mg/mL sodium phosphate dibasic, |
| | 0.44 mg/mL sodium phosphate monobasic |
| | added to 19.1 mL of PBS |
| | Preparation (0.6 mg/mL): 23 mL of hGH Lead 58 |
| | solution in |
| | 7.5 mg/mL NaCl, |
| | 6 mg/mL sucrose, |
| | 2.38 mg/mL sodium phosphate dibasic, |
| | 0.44 mg/mL sodium phosphate monobasic added |
| | to 42 mL of PBS |
| Administration | Per os |

TABLE 108k
hGH(Y42H) Batch # hGH57-002/06
(Group 12, 24)

| | |
|---|---|
| Date of manufacture | May 2006 |
| Expiry date | November 2006 |
| Correspondence | 141 MIU = 1 mg |
| MIU vs mg | |
| Presentation | Sterile solution at 100 μg/mL |
| | Preparation: 15.82 mL of hGH Lead 58 solution in |
| | 7.5 mg/mL NaCl, 6 mg/mL sucrose, 2.38 mg/mL |
| | sodium phosphate dibasic, 0.44 mg/mL sodium |
| | phosphate monobasic added to 49.18 mL of PBS |
| Administration | Intravenous route |

[1001] 2. Part I: Per Os (PO) Dosing

[1002] For PO administration, 8-week old pathogen free Sprague-Dawley rats (301-325 g) were administered a liquid formulation by liquid gavage or capsule composition. The animals were administered either 1.2 mg of native hGH or 1.2, 0.6, 0.3 and 0.15 mg of the either hGH(Y42H) or hGH(Y42I). The treatment groups are presented in Table 109: groups 1-9 were used for PO administration of the liquid formulation and groups 13-21 for PO administration of the capsule formulation. The numbers in parenthesis represent the animal reference numbers in the study.

TABLE 109
Dosage and experimental detail for oral administration study

| Group | Main study | | |
|---|---|---|---|
| number | Number of animals | Treatment | Dose and volume |
| 1 | 5 (1 to 5) | Native hGH | 1.2 mg in 1 mL |
| 2 | 5 (6 to 10) | hGH(Y42H) | 1.2 mg in 1 mL |
| 3 | 5 (11 to 15) | hGH(Y42H) | 0.6 mg in 1 mL |
| 4 | 5 (16 to 20) | hGH(Y42H) | 0.3 mg in 1 mL |
| 5 | 5 (21 to 25) | hGH(Y42H) | 0.15 mg in 1 mL |
| 6 | 5 (26 to 30) | hGH(Y42I) | 1.2 mg in 1 mL |
| 7 | 5 (31 to 35) | hGH(Y42I) | 0.6 mg in 1 mL |
| 8 | 5 (36 to 40) | hGH(Y42I) | 0.3 mg in 1 mL |
| 9 | 5 (41 to 45) | hGH(Y42I) | 0.15 mg in 1 mL |
| 13 | 5 (61 to 65) | Native hGH | 1.2 mg in 1 mL |
| 14 | 5 (66 to 70) | hGH(Y42H) | 1.2 mg in 1 mL |
| 15 | 5 (71 to 75) | hGH(Y42H) | 0.6 mg in 1 mL |
| 16 | 5 (76 to 80) | hGH(Y42H) | 0.3 mg in 1 mL |
| 17 | 5 (81 to 85) | hGH(Y42H) | 0.15 mg in 1 mL |
| 18 | 5 (86 to 90) | hGH(Y42I) | 1.2 mg in 1 mL |
| 19 | 5 (91 to 95) | hGH(Y42I) | 0.6 mg in 1 mL |
| 20 | 5 (96 to 100) | hGH(Y42I) | 0.3 mg in 1 mL |
| 21 | 5 (101 to 105) | hGH(Y42I) | 0.15 mg in 1 mL |

[1003] Blood samples were taken from all of the animals for the determination of plasma levels of the native hGH protein, hGH(Y42H) or hGH(Y42I) in rat serum. Blood samples were drawn on administration day 1 for each group immediately before administration and at 0.5, 1, 2, 4 and 6 hours after administration. 5 males were sampled per time-point and per group. At each time-point, a blood sample (200 μL) was taken and placed in ice cold collection tube containing lithium-heparin and mixed gently. Immediately, 30 μL of an anti-protease solution was added. Tubes were kept on ice and centrifuged at 2000×g for 10 minutes at 4° C. within 30 minutes of collection. The plasma was harvested in three tubes of at least 40 μl each, which was kept frozen at −20° C. or −80° C.

[1004] The amount of remaining hGH in animal plasma was determined using an anti-hGH ELISA kit (Mediagnost GmbH, reference E022), according to the manufacturer's protocol. Human GH ELISA Kit results were expressed in pg/ml after extrapolation from the standard curve of OD values measured with a spectrophotometer at 450 nm. Using PK solution software (SummitPK, Montrose, Colo., USA), PK parameters including Tₘₐₓ, Cₘₐₓ, half-life and AUC were determined for each pharmacokinetic profile.

[1005] Data obtained after PO administration of liquid formulation for hGH(Y42I) and hGH(Y42H) (at doses of 1.2, 0.6, 0.3 and 0.15 mg per rat) are represented in Tables 110a and 110b, respectively. These data were compared with data obtained for native hGH protein (at a single dose of 1.2 mg per rat). The PK profiles of hGH(Y42I) and native hGH proteins detected in systemic blood circulation by ELISA assay represent the average of male rats for each protein. PK parameters calculated from the average of animal PK profiles obtained following liquid formulation administration of hGH(Y42I), hGH(Y42H) and native hGH protein are presented in Tables 110a and 110b.

TABLE 110a
PK parameters for oral liquid administration

| Liquid formulation | hGH(Y42I) | | | | Native hGH |
|---|---|---|---|---|---|
| Dose (mg) | 1.2 | 0.6 | 0.3 | 0.15 | 1.2 |
| Cₘₐₓ (ng/ml) | 655.9 | 556.9 | 276.9 | 248.2 | — |
| Half-life (h) | 3.0 | 3.3 | 2.3 | 2.9 | — |
| AUC_{expo(0-∞)} (ng- | 2381.1 | 2617.1 | 2055.2 | 2411.1 | — |
| h/ml) | | | | | |
| AUC₍₀₋ₜ₎ (ng-h/ml) | 1625.5 | 1709.4 | 1203.7 | 950.2 | — |
| Tₘₐₓ (h) | 1 | 0.5 | 0.5* | 2 | — |

*Tmax value was considered to be 0.5 h instead of 4 h (PK solution software calculation) taking into account the PK profile heterogeneities between animals.

TABLE 110b
PK parameters for oral liquid administration

| Liquid formulation | hGH(Y42H) | | | | Native hGH |
|---|---|---|---|---|---|
| Dose (mg) | 1.2 | 0.6 | 0.3 | 0.15 | 1.2 |
| Cₘₐₓ (ng/ml) | 1030.1 | 958.6 | 461.7 | 378.0 | — |
| Half-life (h) | 3.1 | 2.5 | 3.0 | 1.9 | — |
| AUC_{expo(0-∞)} ng- | 4392.3 | 3446.1 | 2130.0 | 1280.7 | — |
| h/ml) | | | | | |
| AUC₍₀₋ₜ₎ (ng-h/ml) | 3374.1 | 2657.1 | 1445.7 | 1003.7 | — |
| Tₘₐₓ (h) | 1 | 1 | 0.5 | 0.5 | — |

[1006] Data obtained after PO administration of capsule formulation for hGH(Y42I) and hGH(Y42H) (at doses of 1.2, 0.6, 0.3 and 0.15 mg per rat) are represented in Tables 111a and 111b, respectively. These data were compared with data obtained for native hGH protein (at a single dose of 1.2 mg per rat). The PK profiles of hGH(Y42I) and native hGH proteins detected in systemic blood circulation by ELISA assay represent the average of male rats for each protein. PK parameters calculated from the average of animal PK profiles obtained following capsule formulation administration of hGH(Y42I), hGH(Y42H) and native hGH protein are presented in Tables 111a and 111b.

TABLE 111a
PK parameters for oral capsule administration

| Capsule formulation | hGH(Y42I) | | | | Native hGH |
|---|---|---|---|---|---|
| Dose (mg) | 1.2 | 0.6 | 0.3 | 0.15 | 1.2 |
| Cₘₐₓ (ng/ml) | 1360.0 | 916.8 | 732.6 | 829.0 | — |
| Half-life (h) | 4.1 | 2.8 | 2.4 | 0.7 | — |
| AUC_{expo(0-∞)} (ng- | 4970.5 | 3685.0 | 2204.5 | 930.6 | — |
| h/ml) | | | | | |
| AUC₍₀₋ₜ₎ (ng-h/ml) | 2794.2 | 2587.9 | 1755.3 | 804.2 | — |
| Tₘₐₓ (h) | 0.5 | 0.5 | 0.5 | 0.5 | — |

TABLE 111b
PK parameters for oral capsule administration

| Capsule formulation | hGH(Y42H) | | | | Native hGH |
|---|---|---|---|---|---|
| Dose (mg) | 1.2 | 0.6 | 0.3 | 0.15 | 1.2 |
| Cₘₐₓ (ng/ml) | 454.8 | 1082.3 | nd | 586.8 | — |
| Half-life (h) | 3.5 | 2.5 | nd | 1.2 | — |
| AUC_{expo(0-∞)} | 1996.5 | 2908.1 | nd | 1253.1 | — |
| (ng-h/ml) | | | | | |
| AUC₍₀₋ₜ₎ (ng-h/ml) | 1406.3 | 2217.3 | nd | 1031.5 | — |
| Tₘₐₓ (h) | 0.5 | 1 | nd | 1 | — |

nd: no PK parameters have been calculated for PK profile obtained with dose 0.3 mg for variant 57 due to lack of ELISA results obtained for all the rat blood sample at time 2, 4 and 6 h

[1007] For both liquid and capsule formulations, a significant and dose-dependent remaining hGH concentration was detected in rat plasma following PO administration of hGH(Y42I) and hGH(Y42H) whereas no signal was observed in plasma of native hGH protein administered rats. In addition, a dose-dependent increase in half-life of hGH(Y42I) and hGH(Y42H) following PO administration with both capsule and liquid formulations compared to intravenous route (see below) which strongly supports the existence of a sustained delivery of hGH(Y42I) and hGH(Y42H) from the intestinal compartment to the systemic circulation probably related to a slow absorption coupled with resistance to intestinal protease degradation.

[1008] 3. Part II: Intravenous Dosing

[1009] For the IV administration, 8-week old pathogen free Sprague-Dawley rats (301-325 g) were injected i.v. with 0.1 mL of a 100 μg/ml hGH solution (either native hGH, hGH(Y42H), or hGH(Y42I)) per animal (i.e., a 10 μg dose). The treatment groups are presented in Table 112 for the IV dosing. The numbers in parenthesis represent the animal reference numbers in the study.

TABLE 112
Dosage and experimental detail for IV study

| | Main study | | |
|---|---|---|---|
| Group number | Number of animals | Treatment | Dose and volume |
| 10 | 5 (46 to 50) | Native hGH | 10 μg in 0.1 mL |
| 11 | 5 (51 to 55) | hGH(Y42H) | 10 μg in 0.1 mL |
| 12 | 5 (56 to 60) | hGH(Y42I) | 10 μg in 0.1 mL |
| 22 | 5 (106 to 110) | Native hGH | 10 μg in 0.1 mL |
| 23 | 5 (111 to 115) | hGH(Y42H) | 10 μg in 0.1 mL |
| 24 | 5 (116 to 120) | hGH(Y42I) | 10 μg in 0.1 mL |

[1010] Blood samples were taken from all of the animals for the determination of plasma levels of the native hGH protein, hGH(Y42H) or hGH(Y42I) in rat serum. Blood samples were drawn on administration day 1 for each group immediately before administration and at 0.083, 0.5, 1, 2, and 4 hours after administration. 5 males were sampled per time-point and per group. At each time-point, a blood sample (200 μL) was taken and placed in ice cold collection tube containing lithium-heparin and mixed gently. Immediately, 30 μL of an anti-protease solution was added. Tubes were kept on ice and centrifuged at 2000×g for 10 minutes at 4° C. within 30 minutes of collection. The plasma was harvested in three tubes of at least 40 μl each, which was kept frozen at −20° C. or −80° C.

[1011] The amount of remaining hGH in animal plasma was determined using an anti-hGH ELISA kit (Mediagnost GmbH, reference E022), according to the manufacturer's protocol. Human GH ELISA Kit results were expressed in pg/ml after extrapolation from the standard curve of OD values measured with a spectrophotometer at 450 nm. Using PK solution software (SummitPK, Montrose, Colo., USA), PK parameters including Tₘₐₓ, Cₘₐₓ, half-life and AUC were determined for each pharmacokinetic profile.

[1012] Data obtained after IV administration of hGH(Y42H), hGH(Y42I), and native hGH proteins (10 μg/animal dose) are presented Table 113. The PK profiles of hGH proteins detected in systemic blood circulation by ELISA assay represent the average of male rats for each protein. PK parameters calculated from the average of animal PK profiles are presented in Table 113.

TABLE 113
PK parameters for IV administration

| | Cᵢ | AUC_{expo (0-∞)} | Half-life |
|---|---|---|---|
| IV | (ng/ml) | (h-ng/ml) | (h) |
| hGH(Y42I) - 10 μg | 1357.4 | 1158.5 | 0.6 |
| hGH(Y42H) - 10 μg | 1153.3 | 1166.3 | 0.7 |
| Native hGH - 10 μg | 2088.3 | 331.0 | 0.11 |

[1013] The initial concentration (Cᵢ) value obtained for hGH(Y42I) was similar to hGH(Y42H) (1357.4 ng/ml for hGH(Y42I) versus 1153.3 ng/ml for hGH(Y42H)). However, native hGH protein exhibited higher Cᵢ values compared to both hGH(Y42I) and hGH(Y42H) (2088.3 ng/ml for native hGH compared to 1357.4 ng/ml for hGH(Y42I)). An increase of AUC_{expo(0-∞)} about 3.5-fold was observed for rats injected with either hGH(Y42I) or hGH(Y42H) compared to native hGH protein. Similarly, both hGH(Y42I) or hGH(Y42H) exhibited an increased half-life, 5.5-fold and 6.4-fold, respectively, compared to native hGH protein.

[1014] 4. Bioavailability Analysis of PO Versus IV Pharmacokinetic Data

[1015] For each dose of hGH(Y42I) and hGH(Y42H) administered PO in both capsule and liquid formulations to rats, the percentage of hGH(Y42I) bioavailability compared to IV administration was calculated using the following equations:

### Bioavailability (in %) Related to Cₘₐₓ

[1016] ((Cₘₐₓ/dose)_{hGH}/(Cₘₐₓ/dose)_{hGH-IV})×100

### Bioavailability (in %) Related to AUC

[1017] ((AUC/dose)_{hGH}/(AUC/dose)_{hGH-IV})×100

### Bioavailability (in %) Related to AUC and Relative to Native IFN-Alpha

[1018] ((AUC/dose)_{hGHmut}/(AUC/dose)_{native-IV})×100

[1019] For each dose of hGH(Y42I) and hGH(Y42H) liquid formulations administered PO to rats, the percentage of hGH(Y42I) and hGH(Y42H) bioavailability compared to IV administration was calculated related to Cₘₐₓ and AUC. Results are presented in Table 114a for hGH(Y42H) (labeled hgh-57 in Table) and Table 114b for hGH(Y42I) (labeled hgh-58 in Table).

TABLE 114a
Bioavailability data for hGH(Y42H) liquid formulations

| | | | | | Native |
|---|---|---|---|---|---|
| | hgh-57 per-os | | | hgh-57 IV | hgh IV |
| Dose (mg) | 1.2 | 0.6 | 0.3 | 0.01 | 0.01 |
| AUC_{(0-∞)} expo | 4392.3 | 3446.6 | 2130.0 | 1166.3 | 331.0 |
| (ng-hr/ml) | | | | | |
| Cₘₐₓ (ng/ml) | 1030.1 | 958.6 | 461.7 | 1153.3 | 2088.3 |
| Cmax/dose | 858 | 1598 | 1539 | 115330 | 208830 |
| ((Cmax/dose)₅₇/ | 0.7 | 1.4 | 1.3 | | |
| (Cmax/dose)_{57-IV}) × | | | | | |
| 100 | | | | | |
| AUC/dose | 3660 | 5744 | 7100 | 116630 | 33100 |
| (AUC/dose)₅₇/ | 3.1 | 4.9 | 6.1 | | |
| (AUC/dose)_{57-IV}) × | | | | | |
| 100 | | | | | |
| (AUC/dose)₅₇/ | 11.1 | 17.4 | 21.5 | | |
| (AUC/dose)_{natif-IV}) × | | | | | |
| 100 | | | | | |

TABLE 114b
Bioavailability data for hGH(Y42I) liquid formulation

| | | | | | Native |
|---|---|---|---|---|---|
| | hgh-58 per-os | | | hgh-58 IV | hgh IV |
| Dose (mg) | 1.2 | 0.6 | 0.3 | 0.01 | 0.01 |
| AUC_{(0-∞)} expo | 2381.1 | 2617.1 | 2055.2 | 1158.5 | 331.0 |
| (ng-hr/ml) | | | | | |
| Cₘₐₓ (ng/ml) | 655.9 | 556.9 | 276.9 | 1357.4 | 2088.3 |
| Cmax/dose | 547 | 928 | 923 | 135740 | 208830 |
| ((Cmax/dose)₅₈/ | 0.4 | 0.7 | 0.7 | | |
| (Cmax/dose)_{58-IV}) × | | | | | |
| 100 | | | | | |
| AUC/dose | 1984 | 4362 | 6851 | 115850 | 33100 |
| (AUC/dose)₅₈/ | 1.7 | 3.8 | 5.9 | | |
| (AUC/dose)_{58-IV}) × | | | | | |
| 100 | | | | | |
| (AUC/dose)₅₈/ | 6.0 | 13.2 | 20.7 | | |
| (AUC/dose)_{natif-IV}) × | | | | | |
| 100 | | | | | |

[1020] For each dose of hGH(Y42I) and hGH(Y42H) capsule formulations administered PO to rats, the percentage of hGH(Y42I) and hGH(Y42H) bioavailability compared to IV administration was calculated related to Cₘₐₓ and AUC. Results are presented in

Table 115a for hGH(Y42H) (labeled hgh-57 in Table) and Table 115b for hGH(Y42I) (labeled hgh-58 in Table).

TABLE 115a
Bioavailability data for hGH(Y42H) capsule formulation

| | | | | Native |
|---|---|---|---|---|
| | hgh-57 capsules | | hgh-57 IV | hgh IV |
| Dose (mg) | 1.2 | 0.6 | 0.01 | 0.01 |
| AUC_{(0-∞)} (ng-hr/ml) | 1996.5 | 2908.1 | 1166.3 | 331.0 |
| Cₘₐₓ (ng/ml) | 454.8 | 1082.3 | 1153.3 | 2088.3 |
| Cmax/dose | 379 | 1804 | 115330 | 208830 |
| ((Cmax/dose)₅₇/ | 0.3 | 1.6 | | |
| (Cmax/dose)_{57-IV}) × 100 | | | | |
| AUC/dose | 1664 | 4847 | 116630 | 33100 |
| (AUC/dose)₅₇/ | 1.4 | 4.2 | | |
| (AUC/dose)_{57-IV}) × 100 | | | | |
| (AUC/dose)₅₇/ | 5.0 | 14.6 | | |
| (AUC/dose)_{natif-IV}) × 100 | | | | |

TABLE 115b
Bioavailability data for hGH(Y42I) capsule formulations

| | | | | | Native |
|---|---|---|---|---|---|
| | hgh-58 capsules | | | hgh-58 IV | hgh IV |
| Dose (mg) | 1.2 | 0.6 | 0.3 | 0.01 | 0.01 |
| AUC_{(0-∞)} (ng-hr/ml) | 4970.5 | 3685.0 | 2204.5 | 1158.5 | 331.0 |
| Cₘₐₓ (ng/ml) | 1360 | 916.8 | 732.6 | 1357.4 | 2088.3 |
| Cmax/dose | 1133 | 1528 | 2442 | 135740 | 208830 |
| ((Cmax/dose)₅₈/ | 0.8 | 1.1 | 1.8 | | |
| (Cmax/dose)_{58-IV}) × | | | | | |
| 100 | | | | | |
| AUC/dose | 4142 | 6142 | 7348 | 115850 | 33100 |
| (AUC/dose)₅₈/ | 3.6 | 5.3 | 6.3 | | |
| (AUC/dose)_{58-IV}) × | | | | | |
| 100 | | | | | |
| (AUC/dose)₅₈/ | 12.5 | 18.6 | 22.2 | | |
| (AUC/dose)_{natif-IV}) × | | | | | |
| 100 | | | | | |

### Example 28

### In Vivo Pharmacokinetic (PK) Study of hGH(Y42I) and hGH(Y42H) in Normal Rats Compared to Native hGH Following SC and IV Administrations

[1021] Pharmacokinetic studies were performed on 8-week old Sprague-Dawley male rats to compare per subcutaneous (SC) and intravenous (IV) routes of administration. The objective of this study was to investigate the PK profile for hGH variant 57 (Y42H) and hGH variant 58 (Y42I). The study involved 72 Sprague-Dawley male rats (6 groups of 12 animals) and was conducted in two parts: 1) subcutaneous and 2) intravenous injection.

[1022] 1. hGH Formulations Used in the Study

[1023] Preparations of native hGH and hGH variants used in the study are presented in Tables 116(a-f).

TABLE 116a
hGH WT Batch # hGH-004/06
(Group 1)

| | |
|---|---|
| Date of manufacture | June 2006 |
| Expiry date | December 2006 |
| Correspondence MIU | 171 MIU = 1 mg |
| vs mg | |
| Presentation | Sterile solution at 100 μg/mL. |
| | Preparation (0.1 mg/mL): 9.1 mL of a WT hGH |
| | solution in: |
| | 7.5 mg/mL NaCl, |
| | 6 mg/mL sucrose, |
| | 2.38 mg/mL sodium phosphate dibasic, |
| | 0.44 mg/mL sodium phosphate monobasic |
| | added to 0.9 mL of PBS |
| Administration | Subcutaneous route |

TABLE 116b
hGH WT Batch # hGH-004/06
(Group 4)

| | |
|---|---|
| Date of manufacture | June 2006 |
| Expiry date | December 2006 |
| Correspondence MIU vs mg | 171 MIU = 1 mg |
| Presentation | Sterile solution at 50 μg/mL |
| | Preparation (0.05 mg/mL): |
| | 4.5 mL of a WT hGH solution in |
| | 7.5 mg/mL NaCl, |
| | 6 mg/mL sucrose, |
| | 2.38 mg/mL sodium phosphate dibasic, |
| | 0.44 mg/mL sodium phosphate monobasic |
| | added to 5.5 mL of PBS |
| Administration | Intravenous route |

TABLE 116c
hGH(Y42I) Batch # hGH-003/06
(Group 3)

| | |
|---|---|
| Date of manufacture | June 2006 |
| Expiry date | December 2006 |
| Correspondence MIU vs mg | 138 MIU = 1 mg |
| Presentation | Sterile solution at 100 μg/mL |
| | Preparation (0.1 mg/mL): |
| | 7.8 mL of hGH Lead 58 solution in |
| | 7.5 mg/mL NaCl, |
| | 6 mg/mL sucrose, |
| | 2.38 mg/mL sodium phosphate dibasic, |
| | 0.44 mg/mL sodium phosphate monobasic |
| | added to 2.2 mL of PBS |
| Administration | Subcutaneous route |

TABLE 116d
hGH(Y42I) Batch # hGH-003/06
(Group 6)

| | |
|---|---|
| Date of manufacture | June 2006 |
| Expiry date | December 2006 |
| Correspondence MIU vs mg | 138 MIU = 1 mg |
| Presentation | Sterile solution at 50 μg/mL |
| | Preparation (0.05 mg/mL): |
| | 3.9 mL of hGH Lead 58 solution in |
| | 7.5 mg/mL NaCl, |
| | 6 mg/mL sucrose, |
| | 2.38 mg/mL sodium phosphate dibasic, |
| | 0.44 mg/mL sodium phosphate monobasic |
| | added to 6.1 mL of PBS |
| Administration | Intravenous route |

TABLE 116e
hGH(Y42H) Batch # hGH57-002/06
(Group 2)

| | |
|---|---|
| Date of manufacture | May 2006 |
| Expiry date | November 2006 |
| Correspondence MIU vs mg | 141 MIU = 1 mg |
| Presentation | Sterile solution at 100 μg/mL |
| | Preparation (0.1 mg/mL): |
| | 7.8 mL of hGH Lead 57 solution in |
| | 7.5 mg/mL NaCl, |
| | 6 mg/mL sucrose, |
| | 2.38 mg/mL sodium phosphate dibasic, |
| | 0.44 mg/mL sodium phosphate monobasic |
| | added to 2.2 mL of PBS |
| Administration | Subcutaneous route |

TABLE 116f
hGH(Y42H) Batch # hGH57-002/06
(Group 5)

| | |
|---|---|
| Date of manufacture | May 2006 |
| Expiry date | November 2006 |
| Correspondence MIU vs mg | 141 MIU = 1 mg |
| Presentation | Sterile solution at 50 μg/mL |
| | Preparation (0.05 mg/mL): |
| | 3.9 mL of hGH Lead 57 solution in |
| | 7.5 mg/mL NaCl, |
| | 6 mg/mL sucrose, |
| | 2.38 mg/mL sodium phosphate dibasic, |
| | 0.44 mg/mL sodium phosphate monobasic |
| | added to 6.1 mL of PBS |
| Administration | Intravenous route |

[1024] 2. Part I: Subcutaneous Dosing

[1025] For SC administration, 8-week old pathogen free Sprague-Dawley rats (301-325 g) were administered a liquid formulation via subcutaneous injection. The animals were administered with 0.5 mL of 100 μg/mL solution of either native hGH, hGH(Y42H) or hGH(Y42I). Three groups of 12 animals were used. The treatment groups are presented in Table 117. The numbers in parenthesis represent the animal reference numbers in the study.

TABLE 117
Dosage and experimental detail for SC study

| Group | Main study | | Dose and |
|---|---|---|---|
| number | Number of animals | Treatment | volume |
| 1 | 12 males (1 to 12) | Native hGH | 100 μg/ml |
| | | | 0.5 ml |
| 2 | 12 males (13 to 24) | hGH(Y42H) | 100 μg/ml |
| | | | 0.5 ml |
| 3 | 12 males (25 to 36) | hGH(Y42I) | 100 μg/ml |
| | | | 0.5 ml |

[1026] Blood samples were taken from the animals for determination of plasma levels of native hGH, hGH(Y42H) or hGH(Y42I) in rat serum. Blood samples were drawn on administration day 1 for each group immediately before administration and at 0.25, 0.5, 1, 2, 4, 8, 12, 16, 24 and 32 hours after administration. 6 males were sampled per time-point and per group. For the full pharmacokinetic profile for each protein (hGH, hGH(Y42H) or hGH(Y42I)) dose, the group of 12 rats was sampled as follows: one group of 6 males drawn at pre-dose, 0.5, 1, 2, 16 and 48 hours and another group of 6 males at 0.25, 4, 8, 12, 24 and 32 hours. At each time-point, a blood sample (200 μL) was taken and placed in ice cold collection tube containing lithium-heparin and mixed gently. Immediately, 30 μL of an anti-protease solution was added. Tubes were kept on ice and centrifuged at 2000×g for 10 minutes at 4° C. within 30 minutes of collection. The plasma was harvested in three tubes of at least 40 μl each, which was kept frozen at −20° C. or −80° C.

[1027] The amount of remaining hGH in animal plasma was determined using an anti-hGH ELISA kit (Mediagnost GmbH, reference E022), according to the manufacturer's protocol. Human GH ELISA Kit results were expressed in pg/ml after extrapolation from the standard curve of OD values measured with a spectrophotometer at 450 nm. Using PK solution software (SummitPK, Montrose, Colo., USA), PK parameters including Tₘₐₓ, Cₘₐₓ, half-life and AUC were determined for each pharmacokinetic profile.

[1028] Data obtained after SC administration of hGH(Y42I) and native hGH proteins (at a dose of 100 μg/ml) are presented in Table 118. The PK profiles of hGH(Y42I) and native hGH proteins detected in systemic blood circulation by ELISA assay represent the average of the male rats for each protein. PK parameters calculated from the average of animal PK profiles obtained following SC administration of hGH(Y42I) and native hGH proteins is presented in Table 118. Determination of hGH remaining concentration in rat sera following SC administration with hGH(Y42H) was not performed.

TABLE 118
PK parameters for SC administration

| | Cₘₐₓ | AUC_{(0-∞)} | AUC₍₀₋ₜ₎ | Half-life | Tmax |
|---|---|---|---|---|---|
| SC | (ng/ml) | (h-ng/ml) | (h-ng/ml) | (h) | (h) |
| hGH(Y42I) - | 132.8 | 1706.6 | 1704.4 | 14.5 | 1* |
| 00 μg/m | | | | | |
| Native hGH - | 134.9 | 249.2 | 249.2 | 0.7 | 0.5 |
| 100 μg/ml | | | | | |

*Tₘₐₓ value was considered to be 1 h instead of 2 h (PK solution software calculation) taking into account the PK profile heterogeneities between animals

[1029] The Cₘₐₓ value obtained for hGH(Y42I) was similar to native hGH protein (132.8 ng/ml for hGH(Y42I) compared to 134.9 ng/ml for native hGH). An increase of AUC₍₀₋ₜ₎ about 6.8-fold was observed for rats injected with hGH(Y42I) compared to native hGH protein (1706.6 ng-h/ml for hGH(Y42I) versus 249.2 ng-h/ml for native hGH protein). Similarly, half-life for hGH(Y42I) was increased 20.7-fold compared to native protein (14.5 h for hGH(Y42I) versus 0.7 h for native hGH).

[1030] 3. Part II: Intravenous Dosing

[1031] For SC administration, 8-week old pathogen free Sprague-Dawley rats (301-325 g) were administered a liquid formulation via intravenous injection. The animals were administered with 0.3 mL of 50 μg/mL solution of either native hGH, hGH(Y42H) or hGH(Y42I). Three groups of 12 animals were used. The treatment groups are presented in Table 119. The numbers in parenthesis represent the animal reference numbers in the study.

TABLE 119
Dosage and experimental detail for IV study

| | Main study | | Dose and |
|---|---|---|---|
| Group number | Number of animals | Treatment | volume |
| 4 | 12 males (37 to 48) | Native hGH | 50 μg/ml |
| | | | 0.3 ml |
| 5 | 12 males (49 to 60) | hGH variant 57 | 50 μg/ml |
| | | | 0.3 ml |
| 6 | 12 males (61 to 72) | hGH variant 58 | 50 μg/ml |
| | | | 0.3 ml |

[1032] Blood samples were taken from the animals for determination of plasma levels of native hGH, hGH(Y42H) or hGH(Y42I) in rat serum. Blood samples were taken from the animals for determination of plasma levels of native hGH, hGH(Y42H) or hGH(Y42I) in rat serum. Blood samples were drawn on administration day 1 for each group immediately before administration and at 0.05, 0.083, 0.25, 0.5, 1, 1.5, 2, 4, 6, 8 and 12 hours after administration. 6 males were sampled per time-point and per group. For the full pharmacokinetic profile for each protein (hGH, hGH(Y42H) or hGH(Y42I)) dose, the group of 12 rats was sampled as follows: one group of 6 males drawn at pre-dose, 0.083, 0.5, 1.5, 6 and 8 hours and another group of 6 males at 0.05, 0.25, 1, 2, 4 and 12 hours.

[1033] At each time-point, a blood sample (200 μL) was taken and placed in ice cold collection tube containing lithium-heparin and mixed gently. Immediately, 30 μL of an anti-protease solution was added. Tubes were kept on ice and centrifuged at 2000×g for 10 minutes at 4° C. within 30 minutes of collection. The plasma was harvested in three tubes of at least 40 μl each, which was kept frozen at −20° C. or −80° C.

[1034] The amount of remaining hGH in animal plasma was determined using an anti-hGH ELISA kit (Mediagnost GmbH, reference E022), according to the manufacturer's protocol. Human GH ELISA Kit results were expressed in pg/ml after extrapolation from the standard curve of OD values measured with a spectrophotometer at 450 nm. Using PK solution software (SummitPK, Montrose, Colo., USA), PK parameters including Tₘₐₓ, Cₘₐₓ, half-life and AUC were determined for each pharmacokinetic profile.

[1035] Data obtained after IV administration of hGH(Y42I) and native hGH proteins (at a dose of 50 μg/ml) is presented in Table 120. The PK profiles of hGH(Y42I) and native hGH proteins detected in systemic blood circulation by ELISA assay represent the average of male rats for each protein. PK parameters calculated from the average of animal PK profiles obtained following IV administration of hGH(Y42I) and native hGH proteins is presented in Table 120. Determination of hGH remaining concentration in rat sera following IV administration with hGH(Y42H) was not performed.

TABLE 120
PK parameters for IV administration

| | Cᵢ | AUC_{(0-∞)} | Half-life |
|---|---|---|---|
| IV | (ng/ml) | (h-ng/ml) | (h) |
| hGH(Y42I) - 50 μg/ml | 303.4 | 209.8 | 0.73 |
| Native hGH - 50 μg/m | 338.0 | 56.1 | 0.25 |

[1036] The initial concentration (Ci) value obtained for hGH(Y42I) was similar to native hGH protein (303.4 ng/ml for hGH(Y42I) compared to 338.0 ng/ml for native hGH). An increase of AUC_{(0-∞)} about 3.7-fold was observed for rats injected with hGH(Y42I) compared to native hGH protein (209.8 ng-h/ml for hGH(Y42I) versus 56.1 ng-h/ml for native hGH protein). Similarly, half-life for hGH(Y42I) was increased about 3-fold compared to native protein (0.73 h for hGH(Y42I) versus 0.25 h for native hGH).

### Example 29

### In Vivo Study of hGH(Y42I) Activity in Hypophysectomized Rats Compared to Native hGH Following Oral and SC Administrations

[1037] Growth hormone deficiency in humans is associated with increased adiposity and decreased bone mineral density. Hypophysectomized rats are used as a model of pituitary hormone deficiency to study the effects of growth hormone deficiency on bone (Appiagyei-Dankah et al. (2003) Am. J. Physiol. Endocrinol Metab., 284:566-573). Administration of growth hormone in the hypophysectomized rat model has been demonstrated to have stimulatory effects on bone growth and turnover and can prevent hypophysectomized induced skeletal alterations in rats (Cheng et al. (1997) Anat. Rec., 249: 163-172).

[1038] The effects of dosage formulations of growth hormone protease resistant polypeptides administered by subcutaneous or oral route on reversal of effects of growth hormone deficiency in the hypophysectomized animal model were assessed. Hypophysetomized Sprauge Dawley rats were administered with liquid formulations (described in Example 29) of native or hGH(Y42I) by oral (liquid gavage) or subcutaneous route. The treatment groups were as follows: 1) 1200 μg/rat native hGH (oral); 2) 300 μg/rat hGH(Y42I) (oral); 3) 600 μg/rat hGH(Y42I) (oral); 4) 16 μg/rat native hGH (subcutaneous); and 5) vehicle only control. Changes in body weight were monitored daily for at 1, 2, 3, 4, 5, 5, 7, and 8 days after administration of the polypeptide.

[1039] The results are shown in FIG. 2. Results from this experiment demonstrate that treatment of hypophysectomized rats treated subcutaneously with native growth hormone at 16 μg/rat resulted in an increased body weight, thereby evidencing activity of growth hormone in this model. In contrast, administration of native growth hormone orally, even at doses at high as 1200 μg/rat, showed no increase in body weight. Administration of hGH(Y42I) orally at doses of 300 μg/rat and 600 μg/rat resulted in an increased change in body weight at levels that were similar to that seen in rats administered with native hGH subcutaneously. This result establishes that a dosage formulation of a protease resistant hGH of 15-40 times that of the subcutaneous dose of a native hGH is sufficient to yield a similar activity and effect in a model of growth hormone deficiency.

[1040] Since modifications will be apparent to those of skill in this art, it is intended that this invention be limited only by the scope of the appended claims.

1. A dosage formulation, comprising an amount of a therapeutic polypeptide sufficient, upon oral administration to a subject, to reach therapeutically effective levels in the bloodstream in the subject, wherein:
the therapeutic protein is modified in its primary sequence of amino acids, whereby it is more protease resistant than in the absence of the modifications, and the protein can reach therapeutically effective levels in the bloodstream upon oral administration; and
the amount is about or is 10-100 times the subcutaneous dose for the same indication and for the same therapeutic polypeptide that is not modified to be protease resistant.

2. The dosage formulation of claim 1, wherein the therapeutic polypeptide contains one or two amino acid sequence substitutions that render it more protease resistant than in the absence of the modifications.

3. The dosage formulation of claim 1, wherein the amount is 10-50 times the subcutaneous dose for the same indication and for the same therapeutic polypeptide.

4. The dosage formulation of claim 1, wherein the amount is 15-40 times the subcutaneous dose for the same indication and for the same therapeutic polypeptide.

5. The dosage formulation of claim 1, wherein:
the dosage formulation comprises a plurality of dosage units; and
each dosage unit comprises a fractional amount of the total amount of the therapeutic polypeptide in the dosage formulation.

6. The dosage formulation of claim 5, wherein the dosage unit is a tablet or capsule.

7. The dosage formulation of claim 6, wherein the dosage unit is enterically coated.

8. The dosage formulation of claim 1, wherein:
the dosage formulation comprises one or more dosage units containing the therapeutic polypeptide; and
each dosage unit is a tablet or capsule.

9. The dosage formulation of claim 8, wherein the dosage unit is a tablet.

10. The dosage formulation of claim 9, wherein the dosage unit is enterically coated.

11. The dosage formulation of claim 1, wherein the therapeutic polypeptide is a cytokine or a blood coagulation factor.

12. The dosage formulation of claim 1, wherein the therapeutic polypeptide is selected from among interleukin-10, an interferon-β, an interferon alpha, interferon gamma, granulocyte colony stimulating, leukemia inhibitory factor, a growth hormone, ciliary neurotrophic factor, leptin, insulin, oncostatin M, relaxin, interleukin-6, interleukin-12, erythropoietin, granulocyte-macrophage colony stimulating factor, interleukin-2, interleukin-3, interleukin-4, interleukin-5, interleukin-13, Flt3 ligand, a monoclonal antibody or fragment thereof and stem cell factor.

13. The dosage formulation of claim 1, wherein the modifications to increase protease resistance are the only modifications in the sequence of amino acids compared to a wild-type polypeptide or polypeptide not modified to exhibit increased protease resistance.

14. The dosage formulation of claim 1, wherein the polypeptide includes further modifications that alter properties other than protease resistance in the sequence of amino acids compared to a wild-type polypeptide or polypeptide not modified to exhibit increased protease resistance.

15. The dosage formulation of claim 1, wherein the polypeptide includes modifications that add new glycosylation sites to the polypeptide, whereby the polypeptide is hyperglycosylated.

16. The dosage formulation of claim 1, wherein the protease-resistant polypeptide is selected from among protease-resistant variants of coagulation factors, cytokines, growth factors, hormones, hydrolases, immunoglobulins, inhibitor polypeptides, nuclear polypeptides and proteases.

17. The dosage formulation of claim 16, wherein the unmodified polypeptide is selected from among interleukin-10 (IL-10; SEQ ID NO: 809), interferon beta (IFN-β; SEQ ID NO: 147), interferon alpha-2a (IFNα-2a; SEQ ID NO: 2162), interferon alpha-2b (IFNα-2b; SEQ ID NO: 2067), interferon gamma (IFN-γ; SEQ ID NO: 661), granulocyte colony stimulating factor (G-CSF; SEQ ID NO: 85), leukemia inhibitory factor (LIF; SEQ ID NO: 1148), growth hormone (GH; SEQ ID NO: 1260), ciliary neurotrophic factor (CNTF; SEQ ID NO: 1), leptin (SEQ ID NO: 1126), oncostatin M (SEQ ID NO: 1181), interleukin-6 (IL-6; SEQ ID NO: 1080), interleukin-12 (IL-12; SEQ ID NO: 860); erythropoietin (EPO; SEQ ID NO: 1886), granulocyte-macrophage colony stimulating factor (GM-CSF; SEQ ID NO: 47), interleukin-2 (IL-2; SEQ ID NO: 946), interleukin-3 (IL-3; SEQ ID NO: 995), interleukin-4 (IL-4; SEQ ID NO: 1018), interleukin-5 (IL-5; SEQ ID NO: 1044), interleukin-13 (IL-13; SEQ ID NO: 917), Flt3 ligand (SEQ ID NO: 118) and stem cell factor (SCE; SEQ ID NO: 1215).

18. The dosage formulation of claim 17, wherein the polypeptide is selected from modified therapeutic polypeptides who sequences are set forth in any of SEQ ID NOS: 2-46, 48-84, 86-117, 119-146, 148-660, 662-808, 810-859, 861-916, 918-945, 947-994, 996-1017, 1019-1043, 1045-1079, 1081-1125, 1127-1147, 1149-1180, 1182-1214, 1216-1259, 1261-1885, 1887-1981, 1983-2066, and 2176-2182.

19. The dosage formulation of claim 1, wherein the modified polypeptide is IFN-α2b or human growth hormone.

20. The dosage formulation of claim 19, wherein the polypeptide is IFN-α2b containing a modification that is or corresponds to E41Q of SEQ ID NO: 2067.

21. The dosage formulation of claim 19, wherein the modified therapeutic polypeptide is a human growth hormone containing a modification that is or corresponds to Y421 of SEQ ID NO: 1260.

22. The dosage formulation of claim 20, wherein the sequence of amino acids of the IFN-α2b is set forth in SEQ ID NO: 1995.

23. The dosage formulation of claim 21, wherein the sequence of the growth hormone is set forth in SEQ ID NO: 1318.

24. A tablet or capsule, comprising 10-100 μg of an interferon-α(IFN-α), wherein the IFN-α is protease resistant by virtue of modifications in its primary sequence of amino acids.

25. The tablet or capsule of claim 24, wherein the IFN-α is IFN-α2a or IFN-α2b.

26. The tablet or capsule of claim 24, comprising a second therapeutic agent for the same indication as the interferon.

27. The tablet or capsule of claim 26, wherein the second therapeutic agent is selected from among a nucleoside analog, an L-nucleoside, a type II interferon receptor antagonist, a tumor necrosis factor (TNF) antagonist, thymosin-α, a SAPK inhibitor, amantidine, an NS3 inhibitor, an NS5B inhibitor, and an alpha-glucosidase inhibitor.

28. The tablet or capsule of claim 27, wherein the nucleoside analog is ribavirin.

29. A tablet or capsule of claim 24, comprising 10-50 μg of an interferon-α protease-resistant polypeptide.

30. The tablet or capsule of claim 24, wherein the IFN-α further comprises additional modifications, whereby it is hyperglycosylated.

31. The tablet or capsule of claim 24 that is enterically coated.

32. The tablet or capsule of claim 25, wherein the IFN-α2b contains a modification that is or corresponds to E41Q of SEQ ID NO: 2067.

33. The tablet or capsule of claim 25, wherein the IFN-α2b comprises the sequence of amino acids set forth in SEQ ID NO: 1995.

34. A tablet or capsule, comprising 1-50 mg, 10-50 mg, 10-40 mg, 15-35 mg, 1-40 mg, 1-45 mg, 5-30 mg, 10-20 mg or 3-30mg of human growth hormone, wherein the human growth hormone is protease resistant.

35. The tablet or capsule of claim 34, comprising a second therapeutic agent for the same indication as the growth hormone.

36. The tablet or capsule of claim 35, wherein the second therapeutic agent is selected from among a gonadotropin releasing hormone (GNRH) analog, insulin-like growth factor 1, (rhIGF-1), a growth hormone-releasing peptide (GRP), a free fatty acid regulation agent, leutenizing hormone releasing hormone, and an anabolic steroid.

37. The tablet or capsule of claim 34, wherein the tablet or capsule contains 3 mg, 12 mg, 24 mg or 30 mg of the protease-resistant growth hormone polypeptide.

38. The tablet or capsule of claim 34 that is enterically coated.

39. The tablet or capsule of claim 34, wherein the human growth hormone further comprises additional modifications, whereby it is hyperglycoslated.

40. The tablet or capsule of claim 34, wherein the human growth hormone contains a modification that is or corresponds to Y42I of SEQ ID NO: 1260.

41. The tablet or capsule of claim 34, wherein the human growth hormone comprises the sequence of amino acids set forth in SEQ ID NO: 1318.

42. A dosage formulation, comprising a plurality of tablets or capsules of claim 24.

43. A dosage formulation, comprising a plurality of tablets or capsules of claim 34.

44. A method of treatment of a disease or condition, comprising administering an oral dosage formulation of a modified therapeutic polypeptide, wherein:
the therapeutic polypeptide is modified in its primary sequence of amino acids, whereby it is more protease resistant than in the absence of the modifications, and the polypeptide can reach therapeutically effective levels in the bloodstream upon oral administration; and
the amount of therapeutic polypeptide in the formulation is 15-40 times the subcutaneous dose for the same indication and for the same therapeutic polypeptide that is not modified to be protease resistant.

45. The method of claim 44, wherein the therapeutic polypeptide is an IFN-α polypeptide.

46. The method of claim 44, wherein the disease or condition is selected from among a viral infection, a fibrotic disorder, condylomata acuminate and cancer.

47. The method of claim 46, wherein the viral infection is a hepatitis C infection or a hepatitis B infection.

48. The method of claim 46, wherein the cancer is selected from among hairy cell leukemia, malignant lymphoma, follicular lymphoma and AIDS-related Karposi sarcoma.

49. The method of claim 46, wherein the fibrotic disorder is selected from among idiopathic pulmonary fibrosis, liver fibrosis and renal fibrosis.

50. The method of claim 44, wherein the therapeutic polypeptide is a growth hormone polypeptide.

51. The method of claim 44, wherein the disease or condition is selected from among a growth deficiency disorder, AIDS wasting, aging, impaired immune function of HIV-infected subjects, a catabolic illness, surgical recovery, a congestive cardiomyopathy, liver transplantation, liver regeneration after hepatectomy, chronic renal failure, renal osteodystrophy, osteoporosis, achondroplasia/hypochondroplasia, skeletal dysplasia, a chronic inflammatory disorder, Crohn's disease, short bowel syndrome, juvenile chronic arthritis, cystic fibrosis, male infertility, X-Iinked hypophosphatemic rickets, Down's syndrome, Spina bifida, Noonan Syndrome, obesity, impaired muscle strength and fibromyalgia.

52. The method of claim 51, wherein the growth deficiency disorder is selected from among Turner's syndrome, intrauterine growth retardation, idiopathic short stature, Prader Willi syndrome, and thalassaenua.

53. The method of claim 44, wherein the dosage formulation contains a plurality of dosage units and all are administered in a single day.

54. The method of claim 44, wherein a dosage formulation is administered one, two, three, four, five, six or seven times a week.

55. The method of claim 44, wherein a dosage formulation is administered one, two or three times a day.

56. A method of treatment of a disease or condition, comprising administering a dosage formulation of claim 1.

57. A method of treatment of a disease or condition, comprising administering the tablet or capsule of claim 24.

58. A method of treatment of a disease or condition, comprising administering the tablet or capsule of claim 34.

The application's sequence listing, which the Patent Office published only in electronic form, follows.

SEQUENCE LISTING (2183 sequences)

SEQ ID NO: 1 - protein, 200 aa, Homo sapiens
  CNTF_WT
MAFTEHSPLTPHRRDLCSRSIWLARKIRSDLTALTESYVKHQGLNKNINLDSADGMPVASTDQWSELTEAERLQENLQAYRTFHVLLARLLEDQQVHFTPTEGDFHQAIHTLLLQVAAFAYQIEELMILLEYKIPRNEADGMPINVGDGGLFEKKLWGLKVLQELSQWTVRSIHDLRFISSHQTGIPARGSHYIANNKKM

SEQ ID NO: 2 - protein, 200 aa, Homo sapiens
  CNTF_D62N
MAFTEHSPLTPHRRDLCSRSIWLARKIRSDLTALTESYVKHQGLNKNINLDSADGMPVASTNQWSELTEAERLQENLQAYRTFHVLLARLLEDQQVHFTPTEGDFHQAIHTLLLQVAAFAYQIEELMILLEYKIPRNEADGMPINVGDGGLFEKKLWGLKVLQELSQWTVRSIHDLRFISSHQTGIPARGSHYIANNKKM

SEQ ID NO: 3 - protein, 200 aa, Homo sapiens
  CNTF_D62Q
MAFTEHSPLTPHRRDLCSRSIWLARKIRSDLTALTESYVKHQGLNKNINLDSADGMPVASTQQWSELTEAERLQENLQAYRTFHVLLARLLEDQQVHFTPTEGDFHQAIHTLLLQVAAFAYQIEELMILLEYKIPRNEADGMPINVGDGGLFEKKLWGLKVLQELSQWTVRSIHDLRFISSHQTGIPARGSHYIANNKKM

SEQ ID NO: 4 - protein, 200 aa, Homo sapiens
  CNTF_W64S
MAFTEHSPLTPHRRDLCSRSIWLARKIRSDLTALTESYVKHQGLNKNINLDSADGMPVASTDQSSELTEAERLQENLQAYRTFHVLLARLLEDQQVHFTPTEGDFHQAIHTLLLQVAAFAYQIEELMILLEYKIPRNEADGMPINVGDGGLFEKKLWGLKVLQELSQWTVRSIHDLRFISSHQTGIPARGSHYIANNKKM

SEQ ID NO: 5 - protein, 200 aa, Homo sapiens
  CNTF_W64H
MAFTEHSPLTPHRRDLCSRSIWLARKIRSDLTALTESYVKHQGLNKNINLDSADGMPVASTDQHSELTEAERLQENLQAYRTFHVLLARLLEDQQVHFTPTEGDFHQAIHTLLLQVAAFAYQIEELMILLEYKIPRNEADGMPINVGDGGLFEKKLWGLKVLQELSQWTVRSIHDLRFISSHQTGIPARGSHYIANNKKM

SEQ ID NO: 6 - protein, 200 aa, Homo sapiens
  CNTF_E66N
MAFTEHSPLTPHRRDLCSRSIWLARKIRSDLTALTESYVKHQGLNKNINLDSADGMPVASTDQWSNLTEAERLQENLQAYRTFHVLLARLLEDQQVHFTPTEGDFHQAIHTLLLQVAAFAYQIEELMILLEYKIPRNEADGMPINVGDGGLFEKKLWGLKVLQELSQWTVRSIHDLRFISSHQTGIPARGSHYIANNKKM

SEQ ID NO: 7 - protein, 200 aa, Homo sapiens
  CNTF_E66Q
MAFTEHSPLTPHRRDLCSRSIWLARKIRSDLTALTESYVKHQGLNKNINLDSADGMPVASTDQWSQLTEAERLQENLQAYRTFHVLLARLLEDQQVHFTPTEGDFHQAIHTLLLQVAAFAYQIEELMILLEYKIPRNEADGMPINVGDGGLFEKKLWGLKVLQELSQWTVRSIHDLRFISSHQTGIPARGSHYIANNKKM

SEQ ID NO: 8 - protein, 200 aa, Homo sapiens
  CNTF_E66H
MAFTEHSPLTPHRRDLCSRSIWLARKIRSDLTALTESYVKHQGLNKNINLDSADGMPVASTDQWSHLTEAERLQENLQAYRTFHVLLARLLEDQQVHFTPTEGDFHQAIHTLLLQVAAFAYQIEELMILLEYKIPRNEADGMPINVGDGGLFEKKLWGLKVLQELSQWTVRSIHDLRFISSHQTGIPARGSHYIANNKKM

SEQ ID NO: 9 - protein, 200 aa, Homo sapiens
  CNTF_L67I
MAFTEHSPLTPHRRDLCSRSIWLARKIRSDLTALTESYVKHQGLNKNINLDSADGMPVASTDQWSEITEAERLQENLQAYRTFHVLLARLLEDQQVHFTPTEGDFHQAIHTLLLQVAAFAYQIEELMILLEYKIPRNEADGMPINVGDGGLFEKKLWGLKVLQELSQWTVRSIHDLRFISSHQTGIPARGSHYIANNKKM

SEQ ID NO: 10 - protein, 200 aa, Homo sapiens
  CNTF_L67V
MAFTEHSPLTPHRRDLCSRSIWLARKIRSDLTALTESYVKHQGLNKNINLDSADGMPVASTDQWSEVTEAERLQENLQAYRTFHVLLARLLEDQQVHFTPTEGDFHQAIHTLLLQVAAFAYQIEELMILLEYKIPRNEADGMPINVGDGGLFEKKLWGLKVLQELSQWTVRSIHDLRFISSHQTGIPARGSHYIANNKKM

SEQ ID NO: 11 - protein, 200 aa, Homo sapiens
  CNTF_L86I
MAFTEHSPLTPHRRDLCSRSIWLARKIRSDLTALTESYVKHQGLNKNINLDSADGMPVASTDQWSELTEAERLQENLQAYRTFHVILARLLEDQQVHFTPTEGDFHQAIHTLLLQVAAFAYQIEELMILLEYKIPRNEADGMPINVGDGGLFEKKLWGLKVLQELSQWTVRSIHDLRFISSHQTGIPARGSHYIANNKKM

SEQ ID NO: 12 - protein, 200 aa, Homo sapiens
  CNTF_L86V
MAFTEHSPLTPHRRDLCSRSIWLARKIRSDLTALTESYVKHQGLNKNINLDSADGMPVASTDQWSELTEAERLQENLQAYRTFHVVLARLLEDQQVHFTPTEGDFHQAIHTLLLQVAAFAYQIEELMILLEYKIPRNEADGMPINVGDGGLFEKKLWGLKVLQELSQWTVRSIHDLRFISSHQTGIPARGSHYIANNKKM

SEQ ID NO: 13 - protein, 200 aa, Homo sapiens
  CNTF_R89H
MAFTEHSPLTPHRRDLCSRSIWLARKIRSDLTALTESYVKHQGLNKNINLDSADGMPVASTDQWSELTEAERLQENLQAYRTFHVLLAHLLEDQQVHFTPTEGDFHQAIHTLLLQVAAFAYQIEELMILLEYKIPRNEADGMPINVGDGGLFEKKLWGLKVLQELSQWTVRSIHDLRFISSHQTGIPARGSHYIANNKKM

SEQ ID NO: 14 - protein, 200 aa, Homo sapiens
  CNTF_R89Q
MAFTEHSPLTPHRRDLCSRSIWLARKIRSDLTALTESYVKHQGLNKNINLDSADGMPVASTDQWSELTEAERLQENLQAYRTFHVLLAQLLEDQQVHFTPTEGDFHQAIHTLLLQVAAFAYQIEELMILLEYKIPRNEADGMPINVGDGGLFEKKLWGLKVLQELSQWTVRSIHDLRFISSHQTGIPARGSHYIANNKKM

SEQ ID NO: 15 - protein, 200 aa, Homo sapiens
  CNTF_E92N
MAFTEHSPLTPHRRDLCSRSIWLARKIRSDLTALTESYVKHQGLNKNINLDSADGMPVASTDQWSELTEAERLQENLQAYRTFHVLLARLLNDQQVHFTPTEGDFHQAIHTLLLQVAAFAYQIEELMILLEYKIPRNEADGMPINVGDGGLFEKKLWGLKVLQELSQWTVRSIHDLRFISSHQTGIPARGSHYIANNKKM

SEQ ID NO: 16 - protein, 200 aa, Homo sapiens
  CNTF_E92Q
MAFTEHSPLTPHRRDLCSRSIWLARKIRSDLTALTESYVKHQGLNKNINLDSADGMPVASTDQWSELTEAERLQENLQAYRTFHVLLARLLQDQQVHFTPTEGDFHQAIHTLLLQVAAFAYQIEELMILLEYKIPRNEADGMPINVGDGGLFEKKLWGLKVLQELSQWTVRSIHDLRFISSHQTGIPARGSHYIANNKKM

SEQ ID NO: 17 - protein, 200 aa, Homo sapiens
  CNTF_E92H
MAFTEHSPLTPHRRDLCSRSIWLARKIRSDLTALTESYVKHQGLNKNINLDSADGMPVASTDQWSELTEAERLQENLQAYRTFHVLLARLLHDQQVHFTPTEGDFHQAIHTLLLQVAAFAYQIEELMILLEYKIPRNEADGMPINVGDGGLFEKKLWGLKVLQELSQWTVRSIHDLRFISSHQTGIPARGSHYIANNKKM

SEQ ID NO: 18 - protein, 200 aa, Homo sapiens
  CNTF_P100A
MAFTEHSPLTPHRRDLCSRSIWLARKIRSDLTALTESYVKHQGLNKNINLDSADGMPVASTDQWSELTEAERLQENLQAYRTFHVLLARLLEDQQVHFTATEGDFHQAIHTLLLQVAAFAYQIEELMILLEYKIPRNEADGMPINVGDGGLFEKKLWGLKVLQELSQWTVRSIHDLRFISSHQTGIPARGSHYIANNKKM

SEQ ID NO: 19 - protein, 200 aa, Homo sapiens
  CNTF_P100S
MAFTEHSPLTPHRRDLCSRSIWLARKIRSDLTALTESYVKHQGLNKNINLDSADGMPVASTDQWSELTEAERLQENLQAYRTFHVLLARLLEDQQVHFTSTEGDFHQAIHTLLLQVAAFAYQIEELMILLEYKIPRNEADGMPINVGDGGLFEKKLWGLKVLQELSQWTVRSIHDLRFISSHQTGIPARGSHYIANNKKM

SEQ ID NO: 20 - protein, 200 aa, Homo sapiens
  CNTF_E102N
MAFTEHSPLTPHRRDLCSRSIWLARKIRSDLTALTESYVKHQGLNKNINLDSADGMPVASTDQWSELTEAERLQENLQAYRTFHVLLARLLEDQQVHFTPTNGDFHQAIHTLLLQVAAFAYQIEELMILLEYKIPRNEADGMPINVGDGGLFEKKLWGLKVLQELSQWTVRSIHDLRFISSHQTGIPARGSHYIANNKKM

SEQ ID NO: 21 - protein, 200 aa, Homo sapiens
  CNTF_E102Q
MAFTEHSPLTPHRRDLCSRSIWLARKIRSDLTALTESYVKHQGLNKNINLDSADGMPVASTDQWSELTEAERLQENLQAYRTFHVLLARLLEDQQVHFTPTQGDFHQAIHTLLLQVAAFAYQIEELMILLEYKIPRNEADGMPINVGDGGLFEKKLWGLKVLQELSQWTVRSIHDLRFISSHQTGIPARGSHYIANNKKM

SEQ ID NO: 22 - protein, 200 aa, Homo sapiens
  CNTF_E102H
MAFTEHSPLTPHRRDLCSRSIWLARKIRSDLTALTESYVKHQGLNKNINLDSADGMPVASTDQWSELTEAERLQENLQAYRTFHVLLARLLEDQQVHFTPTHGDFHQAIHTLLLQVAAFAYQIEELMILLEYKIPRNEADGMPINVGDGGLFEKKLWGLKVLQELSQWTVRSIHDLRFISSHQTGIPARGSHYIANNKKM

SEQ ID NO: 23 - protein, 200 aa, Homo sapiens
  CNTF_D104N
MAFTEHSPLTPHRRDLCSRSIWLARKIRSDLTALTESYVKHQGLNKNINLDSADGMPVASTDQWSELTEAERLQENLQAYRTFHVLLARLLEDQQVHFTPTEGNFHQAIHTLLLQVAAFAYQIEELMILLEYKIPRNEADGMPINVGDGGLFEKKLWGLKVLQELSQWTVRSIHDLRFISSHQTGIPARGSHYIANNKKM

SEQ ID NO: 24 - protein, 200 aa, Homo sapiens
  CNTF_D104Q
MAFTEHSPLTPHRRDLCSRSIWLARKIRSDLTALTESYVKHQGLNKNINLDSADGMPVASTDQWSELTEAERLQENLQAYRTFHVLLARLLEDQQVHFTPTEGQFHQAIHTLLLQVAAFAYQIEELMILLEYKIPRNEADGMPINVGDGGLFEKKLWGLKVLQELSQWTVRSIHDLRFISSHQTGIPARGSHYIANNKKM

SEQ ID NO: 25 - protein, 200 aa, Homo sapiens
  CNTF_E131N
MAFTEHSPLTPHRRDLCSRSIWLARKIRSDLTALTESYVKHQGLNKNINLDSADGMPVASTDQWSELTEAERLQENLQAYRTFHVLLARLLEDQQVHFTPTEGDFHQAIHTLLLQVAAFAYQIEELMILLNYKIPRNEADGMPINVGDGGLFEKKLWGLKVLQELSQWTVRSIHDLRFISSHQTGIPARGSHYIANNKKM

SEQ ID NO: 26 - protein, 200 aa, Homo sapiens
  CNTF_E131Q
MAFTEHSPLTPHRRDLCSRSIWLARKIRSDLTALTESYVKHQGLNKNINLDSADGMPVASTDQWSELTEAERLQENLQAYRTFHVLLARLLEDQQVHFTPTEGDFHQAIHTLLLQVAAFAYQIEELMILLQYKIPRNEADGMPINVGDGGLFEKKLWGLKVLQELSQWTVRSIHDLRFISSHQTGIPARGSHYIANNKKM

SEQ ID NO: 27 - protein, 200 aa, Homo sapiens
  CNTF_E131H
MAFTEHSPLTPHRRDLCSRSIWLARKIRSDLTALTESYVKHQGLNKNINLDSADGMPVASTDQWSELTEAERLQENLQAYRTFHVLLARLLEDQQVHFTPTEGDFHQAIHTLLLQVAAFAYQIEELMILLHYKIPRNEADGMPINVGDGGLFEKKLWGLKVLQELSQWTVRSIHDLRFISSHQTGIPARGSHYIANNKKM

SEQ ID NO: 28 - protein, 200 aa, Homo sapiens
  CNTF_Y132H
MAFTEHSPLTPHRRDLCSRSIWLARKIRSDLTALTESYVKHQGLNKNINLDSADGMPVASTDQWSELTEAERLQENLQAYRTFHVLLARLLEDQQVHFTPTEGDFHQAIHTLLLQVAAFAYQIEELMILLEHKIPRNEADGMPINVGDGGLFEKKLWGLKVLQELSQWTVRSIHDLRFISSHQTGIPARGSHYIANNKKM

SEQ ID NO: 29 - protein, 200 aa, Homo sapiens
  CNTF_Y132I
MAFTEHSPLTPHRRDLCSRSIWLARKIRSDLTALTESYVKHQGLNKNINLDSADGMPVASTDQWSELTEAERLQENLQAYRTFHVLLARLLEDQQVHFTPTEGDFHQAIHTLLLQVAAFAYQIEELMILLEIKIPRNEADGMPINVGDGGLFEKKLWGLKVLQELSQWTVRSIHDLRFISSHQTGIPARGSHYIANNKKM

SEQ ID NO: 30 - protein, 200 aa, Homo sapiens
  CNTF_K133N
MAFTEHSPLTPHRRDLCSRSIWLARKIRSDLTALTESYVKHQGLNKNINLDSADGMPVASTDQWSELTEAERLQENLQAYRTFHVLLARLLEDQQVHFTPTEGDFHQAIHTLLLQVAAFAYQIEELMILLEYNIPRNEADGMPINVGDGGLFEKKLWGLKVLQELSQWTVRSIHDLRFISSHQTGIPARGSHYIANNKKM

SEQ ID NO: 31 - protein, 200 aa, Homo sapiens
  CNTF_K133Q
MAFTEHSPLTPHRRDLCSRSIWLARKIRSDLTALTESYVKHQGLNKNINLDSADGMPVASTDQWSELTEAERLQENLQAYRTFHVLLARLLEDQQVHFTPTEGDFHQAIHTLLLQVAAFAYQIEELMILLEYQIPRNEADGMPINVGDGGLFEKKLWGLKVLQELSQWTVRSIHDLRFISSHQTGIPARGSHYIANNKKM

SEQ ID NO: 32 - protein, 200 aa, Homo sapiens
  CNTF_P135A
MAFTEHSPLTPHRRDLCSRSIWLARKIRSDLTALTESYVKHQGLNKNINLDSADGMPVASTDQWSELTEAERLQENLQAYRTFHVLLARLLEDQQVHFTPTEGDFHQAIHTLLLQVAAFAYQIEELMILLEYKIARNEADGMPINVGDGGLFEKKLWGLKVLQELSQWTVRSIHDLRFISSHQTGIPARGSHYIANNKKM

SEQ ID NO: 33 - protein, 200 aa, Homo sapiens
  CNTF_P135S
MAFTEHSPLTPHRRDLCSRSIWLARKIRSDLTALTESYVKHQGLNKNINLDSADGMPVASTDQWSELTEAERLQENLQAYRTFHVLLARLLEDQQVHFTPTEGDFHQAIHTLLLQVAAFAYQIEELMILLEYKISRNEADGMPINVGDGGLFEKKLWGLKVLQELSQWTVRSIHDLRFISSHQTGIPARGSHYIANNKKM

SEQ ID NO: 34 - protein, 200 aa, Homo sapiens
  CNTF_R136H
MAFTEHSPLTPHRRDLCSRSIWLARKIRSDLTALTESYVKHQGLNKNINLDSADGMPVASTDQWSELTEAERLQENLQAYRTFHVLLARLLEDQQVHFTPTEGDFHQAIHTLLLQVAAFAYQIEELMILLEYKIPHNEADGMPINVGDGGLFEKKLWGLKVLQELSQWTVRSIHDLRFISSHQTGIPARGSHYIANNKKM

SEQ ID NO: 35 - protein, 200 aa, Homo sapiens
  CNTF_R136Q
MAFTEHSPLTPHRRDLCSRSIWLARKIRSDLTALTESYVKHQGLNKNINLDSADGMPVASTDQWSELTEAERLQENLQAYRTFHVLLARLLEDQQVHFTPTEGDFHQAIHTLLLQVAAFAYQIEELMILLEYKIPQNEADGMPINVGDGGLFEKKLWGLKVLQELSQWTVRSIHDLRFISSHQTGIPARGSHYIANNKKM

SEQ ID NO: 36 - protein, 200 aa, Homo sapiens
  CNTF_E138N
MAFTEHSPLTPHRRDLCSRSIWLARKIRSDLTALTESYVKHQGLNKNINLDSADGMPVASTDQWSELTEAERLQENLQAYRTFHVLLARLLEDQQVHFTPTEGDFHQAIHTLLLQVAAFAYQIEELMILLEYKIPRNNADGMPINVGDGGLFEKKLWGLKVLQELSQWTVRSIHDLRFISSHQTGIPARGSHYIANNKKM

SEQ ID NO: 37 - protein, 200 aa, Homo sapiens
  CNTF_E138Q
MAFTEHSPLTPHRRDLCSRSIWLARKIRSDLTALTESYVKHQGLNKNINLDSADGMPVASTDQWSELTEAERLQENLQAYRTFHVLLARLLEDQQVHFTPTEGDFHQAIHTLLLQVAAFAYQIEELMILLEYKIPRNQADGMPINVGDGGLFEKKLWGLKVLQELSQWTVRSIHDLRFISSHQTGIPARGSHYIANNKKM

SEQ ID NO: 38 - protein, 200 aa, Homo sapiens
  CNTF_E138H
MAFTEHSPLTPHRRDLCSRSIWLARKIRSDLTALTESYVKHQGLNKNINLDSADGMPVASTDQWSELTEAERLQENLQAYRTFHVLLARLLEDQQVHFTPTEGDFHQAIHTLLLQVAAFAYQIEELMILLEYKIPRNHADGMPINVGDGGLFEKKLWGLKVLQELSQWTVRSIHDLRFISSHQTGIPARGSHYIANNKKM

SEQ ID NO: 39 - protein, 200 aa, Homo sapiens
  CNTF_D140N
MAFTEHSPLTPHRRDLCSRSIWLARKIRSDLTALTESYVKHQGLNKNINLDSADGMPVASTDQWSELTEAERLQENLQAYRTFHVLLARLLEDQQVHFTPTEGDFHQAIHTLLLQVAAFAYQIEELMILLEYKIPRNEANGMPINVGDGGLFEKKLWGLKVLQELSQWTVRSIHDLRFISSHQTGIPARGSHYIANNKKM

SEQ ID NO: 40 - protein, 200 aa, Homo sapiens
  CNTF_D140Q
MAFTEHSPLTPHRRDLCSRSIWLARKIRSDLTALTESYVKHQGLNKNINLDSADGMPVASTDQWSELTEAERLQENLQAYRTFHVLLARLLEDQQVHFTPTEGDFHQAIHTLLLQVAAFAYQIEELMILLEYKIPRNEAQGMPINVGDGGLFEKKLWGLKVLQELSQWTVRSIHDLRFISSHQTGIPARGSHYIANNKKM

SEQ ID NO: 41 - protein, 200 aa, Homo sapiens
  CNTF_P143A
MAFTEHSPLTPHRRDLCSRSIWLARKIRSDLTALTESYVKHQGLNKNINLDSADGMPVASTDQWSELTEAERLQENLQAYRTFHVLLARLLEDQQVHFTPTEGDFHQAIHTLLLQVAAFAYQIEELMILLEYKIPRNEADGMAINVGDGGLFEKKLWGLKVLQELSQWTVRSIHDLRFISSHQTGIPARGSHYIANNKKM

SEQ ID NO: 42 - protein, 200 aa, Homo sapiens
  CNTF_P143S
MAFTEHSPLTPHRRDLCSRSIWLARKIRSDLTALTESYVKHQGLNKNINLDSADGMPVASTDQWSELTEAERLQENLQAYRTFHVLLARLLEDQQVHFTPTEGDFHQAIHTLLLQVAAFAYQIEELMILLEYKIPRNEADGMSINVGDGGLFEKKLWGLKVLQELSQWTVRSIHDLRFISSHQTGIPARGSHYIANNKKM

SEQ ID NO: 43 - protein, 200 aa, Homo sapiens
  CNTF_D148N
MAFTEHSPLTPHRRDLCSRSIWLARKIRSDLTALTESYVKHQGLNKNINLDSADGMPVASTDQWSELTEAERLQENLQAYRTFHVLLARLLEDQQVHFTPTEGDFHQAIHTLLLQVAAFAYQIEELMILLEYKIPRNEADGMPINVGNGGLFEKKLWGLKVLQELSQWTVRSIHDLRFISSHQTGIPARGSHYIANNKKM

SEQ ID NO: 44 - protein, 200 aa, Homo sapiens
  CNTF_D148Q
MAFTEHSPLTPHRRDLCSRSIWLARKIRSDLTALTESYVKHQGLNKNINLDSADGMPVASTDQWSELTEAERLQENLQAYRTFHVLLARLLEDQQVHFTPTEGDFHQAIHTLLLQVAAFAYQIEELMILLEYKIPRNEADGMPINVGQGGLFEKKLWGLKVLQELSQWTVRSIHDLRFISSHQTGIPARGSHYIANNKKM

SEQ ID NO: 45 - protein, 200 aa, Homo sapiens
  CNTF_L151I
MAFTEHSPLTPHRRDLCSRSIWLARKIRSDLTALTESYVKHQGLNKNINLDSADGMPVASTDQWSELTEAERLQENLQAYRTFHVLLARLLEDQQVHFTPTEGDFHQAIHTLLLQVAAFAYQIEELMILLEYKIPRNEADGMPINVGDGGIFEKKLWGLKVLQELSQWTVRSIHDLRFISSHQTGIPARGSHYIANNKKM

SEQ ID NO: 46 - protein, 200 aa, Homo sapiens
  CNTF_L151V
MAFTEHSPLTPHRRDLCSRSIWLARKIRSDLTALTESYVKHQGLNKNINLDSADGMPVASTDQWSELTEAERLQENLQAYRTFHVLLARLLEDQQVHFTPTEGDFHQAIHTLLLQVAAFAYQIEELMILLEYKIPRNEADGMPINVGDGGVFEKKLWGLKVLQELSQWTVRSIHDLRFISSHQTGIPARGSHYIANNKKM

SEQ ID NO: 47 - protein, 127 aa, Homo sapiens [sequence omitted]

SEQ ID NO: 48 - protein, 127 aa, Homo sapiens
  CSF2_E38N
APARSPSPSTQPWEHVNAIQEARRLLNLSRDTAAEMNNTVEVISEMFDLQEPTCLQTRLELYKQGLRGSLTKLKGPLTMMASHYKQHCPPTPETSCATQIITFESFKENLKDFLLVIPFDCWEPVQE

SEQ ID NO: 49 - protein, 127 aa, Homo sapiens
  CSF2_E38Q
APARSPSPSTQPWEHVNAIQEARRLLNLSRDTAAEMNQTVEVISEMFDLQEPTCLQTRLELYKQGLRGSLTKLKGPLTMMASHYKQHCPPTPETSCATQIITFESFKENLKDFLLVIPFDCWEPVQE

SEQ ID NO: 50 - protein, 127 aa, Homo sapiens
  CSF2_E38H
APARSPSPSTQPWEHVNAIQEARRLLNLSRDTAAEMNHTVEVISEMFDLQEPTCLQTRLELYKQGLRGSLTKLKGPLTMMASHYKQHCPPTPETSCATQIITFESFKENLKDFLLVIPFDCWEPVQE

SEQ ID NO: 51 - protein, 127 aa, Homo sapiens
  CSF2_E41N
APARSPSPSTQPWEHVNAIQEARRLLNLSRDTAAEMNETVNVISEMFDLQEPTCLQTRLELYKQGLRGSLTKLKGPLTMMASHYKQHCPPTPETSCATQIITFESFKENLKDFLLVIPFDCWEPVQE

SEQ ID NO: 52 - protein, 127 aa, Homo sapiens
  CSF2_E41Q
APARSPSPSTQPWEHVNAIQEARRLLNLSRDTAAEMNETVQVISEMFDLQEPTCLQTRLELYKQGLRGSLTKLKGPLTMMASHYKQHCPPTPETSCATQIITFESFKENLKDFLLVIPFDCWEPVQE

SEQ ID NO: 53 - protein, 127 aa, Homo sapiens
  CSF2_E41H
APARSPSPSTQPWEHVNAIQEARRLLNLSRDTAAEMNETVHVISEMFDLQEPTCLQTRLELYKQGLRGSLTKLKGPLTMMASHYKQHCPPTPETSCATQIITFESFKENLKDFLLVIPFDCWEPVQE

SEQ ID NO: 54 - protein, 127 aa, Homo sapiens
  CSF2_E45N
APARSPSPSTQPWEHVNAIQEARRLLNLSRDTAAEMNETVEVISNMFDLQEPTCLQTRLELYKQGLRGSLTKLKGPLTMMASHYKQHCPPTPETSCATQIITFESFKENLKDFLLVIPFDCWEPVQE

SEQ ID NO: 55 - protein, 127 aa, Homo sapiens
  CSF2_E45Q
APARSPSPSTQPWEHVNAIQEARRLLNLSRDTAAEMNETVEVISQMFDLQEPTCLQTRLELYKQGLRGSLTKLKGPLTMMASHYKQHCPPTPETSCATQIITFESFKENLKDFLLVIPFDCWEPVQE

SEQ ID NO: 56 - protein, 127 aa, Homo sapiens
  CSF2_E45H
APARSPSPSTQPWEHVNAIQEARRLLNLSRDTAAEMNETVEVISHMFDLQEPTCLQTRLELYKQGLRGSLTKLKGPLTMMASHYKQHCPPTPETSCATQIITFESFKENLKDFLLVIPFDCWEPVQE

SEQ ID NO: 57 - protein, 127 aa, Homo sapiens
  CSF2_M46I
APARSPSPSTQPWEHVNAIQEARRLLNLSRDTAAEMNETVEVISEIFDLQEPTCLQTRLELYKQGLRGSLTKLKGPLTMMASHYKQHCPPTPETSCATQIITFESFKENLKDFLLVIPFDCWEPVQE

SEQ ID NO: 58 - protein, 127 aa, Homo sapiens
  CSF2_M46V
APARSPSPSTQPWEHVNAIQEARRLLNLSRDTAAEMNETVEVISEVFDLQEPTCLQTRLELYKQGLRGSLTKLKGPLTMMASHYKQHCPPTPETSCATQIITFESFKENLKDFLLVIPFDCWEPVQE

SEQ ID NO: 59 - protein, 127 aa, Homo sapiens
  CSF2_D48N
APARSPSPSTQPWEHVNAIQEARRLLNLSRDTAAEMNETVEVISEMFNLQEPTCLQTRLELYKQGLRGSLTKLKGPLTMMASHYKQHCPPTPETSCATQIITFESFKENLKDFLLVIPFDCWEPVQE

SEQ ID NO: 60 - protein, 127 aa, Homo sapiens
  CSF2_D48Q
APARSPSPSTQPWEHVNAIQEARRLLNLSRDTAAEMNETVEVISEMFQLQEPTCLQTRLELYKQGLRGSLTKLKGPLTMMASHYKQHCPPTPETSCATQIITFESFKENLKDFLLVIPFDCWEPVQE

SEQ ID NO: 61 - protein, 127 aa, Homo sapiens
  CSF2_L49I
APARSPSPSTQPWEHVNAIQEARRLLNLSRDTAAEMNETVEVISEMFDIQEPTCLQTRLELYKQGLRGSLTKLKGPLTMMASHYKQHCPPTPETSCATQIITFESFKENLKDFLLVIPFDCWEPVQE

SEQ ID NO: 62 - protein, 127 aa, Homo sapiens
  CSF2_L49V
APARSPSPSTQPWEHVNAIQEARRLLNLSRDTAAEMNETVEVISEMFDVQEPTCLQTRLELYKQGLRGSLTKLKGPLTMMASHYKQHCPPTPETSCATQIITFESFKENLKDFLLVIPFDCWEPVQE

SEQ ID NO: 63 - protein, 127 aa, Homo sapiens
  CSF2_E51N
APARSPSPSTQPWEHVNAIQEARRLLNLSRDTAAEMNETVEVISEMFDLQNPTCLQTRLELYKQGLRGSLTKLKGPLTMMASHYKQHCPPTPETSCATQIITFESFKENLKDFLLVIPFDCWEPVQE

SEQ ID NO: 64 - protein, 127 aa, Homo sapiens
  CSF2_E51Q
APARSPSPSTQPWEHVNAIQEARRLLNLSRDTAAEMNETVEVISEMFDLQQPTCLQTRLELYKQGLRGSLTKLKGPLTMMASHYKQHCPPTPETSCATQIITFESFKENLKDFLLVIPFDCWEPVQE

SEQ ID NO: 65 - protein, 127 aa, Homo sapiens
  CSF2_E51H
APARSPSPSTQPWEHVNAIQEARRLLNLSRDTAAEMNETVEVISEMFDLQHPTCLQTRLELYKQGLRGSLTKLKGPLTMMASHYKQHCPPTPETSCATQIITFESFKENLKDFLLVIPFDCWEPVQE

SEQ ID NO: 66 - protein, 127 aa, Homo sapiens
  CSF2_E60N
APARSPSPSTQPWEHVNAIQEARRLLNLSRDTAAEMNETVEVISEMFDLQEPTCLQTRLNLYKQGLRGSLTKLKGPLTMMASHYKQHCPPTPETSCATQIITFESFKENLKDFLLVIPFDCWEPVQE

SEQ ID NO: 67 - protein, 127 aa, Homo sapiens
  CSF2_E60Q
APARSPSPSTQPWEHVNAIQEARRLLNLSRDTAAEMNETVEVISEMFDLQEPTCLQTRLQLYKQGLRGSLTKLKGPLTMMASHYKQHCPPTPETSCATQIITFESFKENLKDFLLVIPFDCWEPVQE

SEQ ID NO: 68 - protein, 127 aa, Homo sapiens
  CSF2_E60H
APARSPSPSTQPWEHVNAIQEARRLLNLSRDTAAEMNETVEVISEMFDLQEPTCLQTRLHLYKQGLRGSLTKLKGPLTMMASHYKQHCPPTPETSCATQIITFESFKENLKDFLLVIPFDCWEPVQE

SEQ ID NO: 69 - protein, 127 aa, Homo sapiens
  CSF2_K63N
APARSPSPSTQPWEHVNAIQEARRLLNLSRDTAAEMNETVEVISEMFDLQEPTCLQTRLELYNQGLRGSLTKLKGPLTMMASHYKQHCPPTPETSCATQIITFESFKENLKDFLLVIPFDCWEPVQE

SEQ ID NO: 70 - protein, 127 aa, Homo sapiens
  CSF2_K63Q
APARSPSPSTQPWEHVNAIQEARRLLNLSRDTAAEMNETVEVISEMFDLQEPTCLQTRLELYQQGLRGSLTKLKGPLTMMASHYKQHCPPTPETSCATQIITFESFKENLKDFLLVIPFDCWEPVQE

SEQ ID NO: 71 - protein, 127 aa, Homo sapiens
  CSF2_P92A
APARSPSPSTQPWEHVNAIQEARRLLNLSRDTAAEMNETVEVISEMFDLQEPTCLQTRLELYKQGLRGSLTKLKGPLTMMASHYKQHCPPTAETSCATQIITFESFKENLKDFLLVIPFDCWEPVQE

SEQ ID NO: 72 - protein, 127 aa, Homo sapiens
  CSF2_P92S
APARSPSPSTQPWEHVNAIQEARRLLNLSRDTAAEMNETVEVISEMFDLQEPTCLQTRLELYKQGLRGSLTKLKGPLTMMASHYKQHCPPTSETSCATQIITFESFKENLKDFLLVIPFDCWEPVQE

SEQ ID NO: 73 - protein, 127 aa, Homo sapiens
  CSF2_E93N
APARSPSPSTQPWEHVNAIQEARRLLNLSRDTAAEMNETVEVISEMFDLQEPTCLQTRLELYKQGLRGSLTKLKGPLTMMASHYKQHCPPTPNTSCATQIITFESFKENLKDFLLVIPFDCWEPVQE

SEQ ID NO: 74 - protein, 127 aa, Homo sapiens
  CSF2_E93Q
APARSPSPSTQPWEHVNAIQEARRLLNLSRDTAAEMNETVEVISEMFDLQEPTCLQTRLELYKQGLRGSLTKLKGPLTMMASHYKQHCPPTPQTSCATQIITFESFKENLKDFLLVIPFDCWEPVQE

SEQ ID NO: 75 - protein, 127 aa, Homo sapiens
  CSF2_E93H
APARSPSPSTQPWEHVNAIQEARRLLNLSRDTAAEMNETVEVISEMFDLQEPTCLQTRLELYKQGLRGSLTKLKGPLTMMASHYKQHCPPTPHTSCATQIITFESFKENLKDFLLVIPFDCWEPVQE

SEQ ID NO: 76 - protein, 127 aa, Homo sapiens
  CSF2_F119I
APARSPSPSTQPWEHVNAIQEARRLLNLSRDTAAEMNETVEVISEMFDLQEPTCLQTRLELYKQGLRGSLTKLKGPLTMMASHYKQHCPPTPETSCATQIITFESFKENLKDFLLVIPIDCWEPVQE

SEQ ID NO: 77 - protein, 127 aa, Homo sapiens
  CSF2_F119V
APARSPSPSTQPWEHVNAIQEARRLLNLSRDTAAEMNETVEVISEMFDLQEPTCLQTRLELYKQGLRGSLTKLKGPLTMMASHYKQHCPPTPETSCATQIITFESFKENLKDFLLVIPVDCWEPVQE

SEQ ID NO: 78 - protein, 127 aa, Homo sapiens
  CSF2_D120N
APARSPSPSTQPWEHVNAIQEARRLLNLSRDTAAEMNETVEVISEMFDLQEPTCLQTRLELYKQGLRGSLTKLKGPLTMMASHYKQHCPPTPETSCATQIITFESFKENLKDFLLVIPFNCWEPVQE

SEQ ID NO: 79 - protein, 127 aa, Homo sapiens
  CSF2_D120Q
APARSPSPSTQPWEHVNAIQEARRLLNLSRDTAAEMNETVEVISEMFDLQEPTCLQTRLELYKQGLRGSLTKLKGPLTMMASHYKQHCPPTPETSCATQIITFESFKENLKDFLLVIPFQCWEPVQE

SEQ ID NO: 80 - protein, 127 aa, Homo sapiens
  CSF2_E123N
APARSPSPSTQPWEHVNAIQEARRLLNLSRDTAAEMNETVEVISEMFDLQEPTCLQTRLELYKQGLRGSLTKLKGPLTMMASHYKQHCPPTPETSCATQIITFESFKENLKDFLLVIPFDCWNPVQE

SEQ ID NO: 81 - protein, 127 aa, Homo sapiens
  CSF2_E123Q
APARSPSPSTQPWEHVNAIQEARRLLNLSRDTAAEMNETVEVISEMFDLQEPTCLQTRLELYKQGLRGSLTKLKGPLTMMASHYKQHCPPTPETSCATQIITFESFKENLKDFLLVIPFDCWQPVQE

SEQ ID NO: 82 - protein, 127 aa, Homo sapiens
  CSF2_E123H
APARSPSPSTQPWEHVNAIQEARRLLNLSRDTAAEMNETVEVISEMFDLQEPTCLQTRLELYKQGLRGSLTKLKGPLTMMASHYKQHCPPTPETSCATQIITFESFKENLKDFLLVIPFDCWHPVQE

SEQ ID NO: 83 - protein, 127 aa, Homo sapiens
  CSF2_P124A
APARSPSPSTQPWEHVNAIQEARRLLNLSRDTAAEMNETVEVISEMFDLQEPTCLQTRLELYKQGLRGSLTKLKGPLTMMASHYKQHCPPTPETSCATQIITFESFKENLKDFLLVIPFDCWEAVQE

SEQ ID NO: 84 - protein, 127 aa, Homo sapiens
  CSF2_P124S
APARSPSPSTQPWEHVNAIQEARRLLNLSRDTAAEMNETVEVISEMFDLQEPTCLQTRLELYKQGLRGSLTKLKGPLTMMASHYKQHCPPTPETSCATQIITFESFKENLKDFLLVIPFDCWESVQE

SEQ ID NO: 85 - protein, 177 aa, Homo sapiens
  CSF3_WT
TPLGPASSLPQSFLLKCLEQVRKIQGDGAALQEKLVSECATYKLCHPEELVLLGHSLGIPWAPLSSCPSQALQLAGCLSQLHSGLFLYQGLLQALEGISPELGPTLDTLQLDVADFATTIWQQMEELGMAPALQPTQGAMPAFASAFQRRAGGVLVASHLQSFLEVSYRVLRHLAQP

SEQ ID NO: 86 - protein, 177 aa, Homo sapiens
  CSF3_W61S
TPLGPASSLPQSFLLKCLEQVRKIQGDGAALQEKLVSECATYKLCHPEELVLLGHSLGIPSAPLSSCPSQALQLAGCLSQLHSGLFLYQGLLQALEGISPELGPTLDTLQLDVADFATTIWQQMEELGMAPALQPTQGAMPAFASAFQRRAGGVLVASHLQSFLEVSYRVLRHLAQP

SEQ ID NO: 87 - protein, 177 aa, Homo sapiens
  CSF3_W61H
TPLGPASSLPQSFLLKCLEQVRKIQGDGAALQEKLVSECATYKLCHPEELVLLGHSLGIPHAPLSSCPSQALQLAGCLSQLHSGLFLYQGLLQALEGISPELGPTLDTLQLDVADFATTIWQQMEELGMAPALQPTQGAMPAFASAFQRRAGGVLVASHLQSFLEVSYRVLRHLAQP

SEQ ID NO: 88 - protein, 177 aa, Homo sapiens
  CSF3_P63A
TPLGPASSLPQSFLLKCLEQVRKIQGDGAALQEKLVSECATYKLCHPEELVLLGHSLGIPWAALSSCPSQALQLAGCLSQLHSGLFLYQGLLQALEGISPELGPTLDTLQLDVADFATTIWQQMEELGMAPALQPTQGAMPAFASAFQRRAGGVLVASHLQSFLEVSYRVLRHLAQP

SEQ ID NO: 89 - protein, 177 aa, Homo sapiens
  CSF3_P63S
TPLGPASSLPQSFLLKCLEQVRKIQGDGAALQEKLVSECATYKLCHPEELVLLGHSLGIPWASLSSCPSQALQLAGCLSQLHSGLFLYQGLLQALEGISPELGPTLDTLQLDVADFATTIWQQMEELGMAPALQPTQGAMPAFASAFQRRAGGVLVASHLQSFLEVSYRVLRHLAQP

SEQ ID NO: 90 - protein, 177 aa, Homo sapiens
  CSF3_P68A
TPLGPASSLPQSFLLKCLEQVRKIQGDGAALQEKLVSECATYKLCHPEELVLLGHSLGIPWAPLSSCASQALQLAGCLSQLHSGLFLYQGLLQALEGISPELGPTLDTLQLDVADFATTIWQQMEELGMAPALQPTQGAMPAFASAFQRRAGGVLVASHLQSFLEVSYRVLRHLAQP

SEQ ID NO: 91 - protein, 177 aa, Homo sapiens
  CSF3_P68S
TPLGPASSLPQSFLLKCLEQVRKIQGDGAALQEKLVSECATYKLCHPEELVLLGHSLGIPWAPLSSCSSQALQLAGCLSQLHSGLFLYQGLLQALEGISPELGPTLDTLQLDVADFATTIWQQMEELGMAPALQPTQGAMPAFASAFQRRAGGVLVASHLQSFLEVSYRVLRHLAQP

SEQ ID NO: 92 - protein, 177 aa, Homo sapiens
  CSF3_L72I
TPLGPASSLPQSFLLKCLEQVRKIQGDGAALQEKLVSECATYKLCHPEELVLLGHSLGIPWAPLSSCPSQAIQLAGCLSQLHSGLFLYQGLLQALEGISPELGPTLDTLQLDVADFATTIWQQMEELGMAPALQPTQGAMPAFASAFQRRAGGVLVASHLQSFLEVSYRVLRHLAQP

SEQ ID NO: 93 - protein, 177 aa, Homo sapiens
  CSF3_L72V
TPLGPASSLPQSFLLKCLEQVRKIQGDGAALQEKLVSECATYKLCHPEELVLLGHSLGIPWAPLSSCPSQAVQLAGCLSQLHSGLFLYQGLLQALEGISPELGPTLDTLQLDVADFATTIWQQMEELGMAPALQPTQGAMPAFASAFQRRAGGVLVASHLQSFLEVSYRVLRHLAQP

SEQ ID NO: 94 - protein, 177 aa, Homo sapiens
  CSF3_F86I
TPLGPASSLPQSFLLKCLEQVRKIQGDGAALQEKLVSECATYKLCHPEELVLLGHSLGIPWAPLSSCPSQALQLAGCLSQLHSGLILYQGLLQALEGISPELGPTLDTLQLDVADFATTIWQQMEELGMAPALQPTQGAMPAFASAFQRRAGGVLVASHLQSFLEVSYRVLRHLAQP

SEQ ID NO: 95 - protein, 177 aa, Homo sapiens
  CSF3_F86V
TPLGPASSLPQSFLLKCLEQVRKIQGDGAALQEKLVSECATYKLCHPEELVLLGHSLGIPWAPLSSCPSQALQLAGCLSQLHSGLVLYQGLLQALEGISPELGPTLDTLQLDVADFATTIWQQMEELGMAPALQPTQGAMPAFASAFQRRAGGVLVASHLQSFLEVSYRVLRHLAQP

SEQ ID NO: 96 - protein, 177 aa, Homo sapiens
  CSF3_E96N
TPLGPASSLPQSFLLKCLEQVRKIQGDGAALQEKLVSECATYKLCHPEELVLLGHSLGIPWAPLSSCPSQALQLAGCLSQLHSGLFLYQGLLQALNGISPELGPTLDTLQLDVADFATTIWQQMEELGMAPALQPTQGAMPAFASAFQRRAGGVLVASHLQSFLEVSYRVLRHLAQP

SEQ ID NO: 97 - protein, 177 aa, Homo sapiens
  CSF3_E96Q
TPLGPASSLPQSFLLKCLEQVRKIQGDGAALQEKLVSECATYKLCHPEELVLLGHSLGIPWAPLSSCPSQALQLAGCLSQLHSGLFLYQGLLQALQGISPELGPTLDTLQLDVADFATTIWQQMEELGMAPALQPTQGAMPAFASAFQRRAGGVLVASHLQSFLEVSYRVLRHLAQP

SEQ ID NO: 98 - protein, 177 aa, Homo sapiens
  CSF3_E96H
TPLGPASSLPQSFLLKCLEQVRKIQGDGAALQEKLVSECATYKLCHPEELVLLGHSLGIPWAPLSSCPSQALQLAGCLSQLHSGLFLYQGLLQALHGISPELGPTLDTLQLDVADFATTIWQQMEELGMAPALQPTQGAMPAFASAFQRRAGGVLVASHLQSFLEVSYRVLRHLAQP

SEQ ID NO: 99 - protein, 177 aa, Homo sapiens
  CSF3_P100A
TPLGPASSLPQSFLLKCLEQVRKIQGDGAALQEKLVSECATYKLCHPEELVLLGHSLGIPWAPLSSCPSQALQLAGCLSQLHSGLFLYQGLLQALEGISAELGPTLDTLQLDVADFATTIWQQMEELGMAPALQPTQGAMPAFASAFQRRAGGVLVASHLQSFLEVSYRVLRHLAQP

SEQ ID NO: 100 - protein, 177 aa, Homo sapiens
  CSF3_P100S
TPLGPASSLPQSFLLKCLEQVRKIQGDGAALQEKLVSECATYKLCHPEELVLLGHSLGIPWAPLSSCPSQALQLAGCLSQLHSGLFLYQGLLQALEGISSELGPTLDTLQLDVADFATTIWQQMEELGMAPALQPTQGAMPAFASAFQRRAGGVLVASHLQSFLEVSYRVLRHLAQP

SEQ ID NO: 101 - protein, 177 aa, Homo sapiens
  CSF3_E101N
TPLGPASSLPQSFLLKCLEQVRKIQGDGAALQEKLVSECATYKLCHPEELVLLGHSLGIPWAPLSSCPSQALQLAGCLSQLHSGLFLYQGLLQALEGISPNLGPTLDTLQLDVADFATTIWQQMEELGMAPALQPTQGAMPAFASAFQRRAGGVLVASHLQSFLEVSYRVLRHLAQP

SEQ ID NO: 102 - protein, 177 aa, Homo sapiens
  CSF3_E101Q
TPLGPASSLPQSFLLKCLEQVRKIQGDGAALQEKLVSECATYKLCHPEELVLLGHSLGIPWAPLSSCPSQALQLAGCLSQLHSGLFLYQGLLQALEGISPQLGPTLDTLQLDVADFATTIWQQMEELGMAPALQPTQGAMPAFASAFQRRAGGVLVASHLQSFLEVSYRVLRHLAQP

SEQ ID NO: 103 - protein, 177 aa, Homo sapiens
  CSF3_E101H
TPLGPASSLPQSFLLKCLEQVRKIQGDGAALQEKLVSECATYKLCHPEELVLLGHSLGIPWAPLSSCPSQALQLAGCLSQLHSGLFLYQGLLQALEGISPHLGPTLDTLQLDVADFATTIWQQMEELGMAPALQPTQGAMPAFASAFQRRAGGVLVASHLQSFLEVSYRVLRHLAQP

SEQ ID NO: 104 - protein, 177 aa, Homo sapiens
  CSF3_P131A
TPLGPASSLPQSFLLKCLEQVRKIQGDGAALQEKLVSECATYKLCHPEELVLLGHSLGIPWAPLSSCPSQALQLAGCLSQLHSGLFLYQGLLQALEGISPELGPTLDTLQLDVADFATTIWQQMEELGMAAALQPTQGAMPAFASAFQRRAGGVLVASHLQSFLEVSYRVLRHLAQP

SEQ ID NO: 105 - protein, 177 aa, Homo sapiens
  CSF3_P131S
TPLGPASSLPQSFLLKCLEQVRKIQGDGAALQEKLVSECATYKLCHPEELVLLGHSLGIPWAPLSSCPSQALQLAGCLSQLHSGLFLYQGLLQALEGISPELGPTLDTLQLDVADFATTIWQQMEELGMASALQPTQGAMPAFASAFQRRAGGVLVASHLQSFLEVSYRVLRHLAQP

SEQ ID NO: 106 - protein, 177 aa, Homo sapiens
  CSF3_L133I
TPLGPASSLPQSFLLKCLEQVRKIQGDGAALQEKLVSECATYKLCHPEELVLLGHSLGIPWAPLSSCPSQALQLAGCLSQLHSGLFLYQGLLQALEGISPELGPTLDTLQLDVADFATTIWQQMEELGMAPAIQPTQGAMPAFASAFQRRAGGVLVASHLQSFLEVSYRVLRHLAQP

SEQ ID NO: 107 - protein, 177 aa, Homo sapiens
  CSF3_L133V
TPLGPASSLPQSFLLKCLEQVRKIQGDGAALQEKLVSECATYKLCHPEELVLLGHSLGIPWAPLSSCPSQALQLAGCLSQLHSGLFLYQGLLQALEGISPELGPTLDTLQLDVADFATTIWQQMEELGMAPAVQPTQGAMPAFASAFQRRAGGVLVASHLQSFLEVSYRVLRHLAQP

SEQ ID NO: 108 - protein, 177 aa, Homo sapiens
  CSF3_P135A
TPLGPASSLPQSFLLKCLEQVRKIQGDGAALQEKLVSECATYKLCHPEELVLLGHSLGIPWAPLSSCPSQALQLAGCLSQLHSGLFLYQGLLQALEGISPELGPTLDTLQLDVADFATTIWQQMEELGMAPALQATQGAMPAFASAFQRRAGGVLVASHLQSFLEVSYRVLRHLAQP

SEQ ID NO: 109 - protein, 177 aa, Homo sapiens
  CSF3_P135S
TPLGPASSLPQSFLLKCLEQVRKIQGDGAALQEKLVSECATYKLCHPEELVLLGHSLGIPWAPLSSCPSQALQLAGCLSQLHSGLFLYQGLLQALEGISPELGPTLDTLQLDVADFATTIWQQMEELGMAPALQSTQGAMPAFASAFQRRAGGVLVASHLQSFLEVSYRVLRHLAQP

SEQ ID NO: 110 - protein, 177 aa, Homo sapiens
  CSF3_F147I
TPLGPASSLPQSFLLKCLEQVRKIQGDGAALQEKLVSECATYKLCHPEELVLLGHSLGIPWAPLSSCPSQALQLAGCLSQLHSGLFLYQGLLQALEGISPELGPTLDTLQLDVADFATTIWQQMEELGMAPALQPTQGAMPAFASAIQRRAGGVLVASHLQSFLEVSYRVLRHLAQP

SEQ ID NO: 111 - protein, 177 aa, Homo sapiens
  CSF3_F147V
TPLGPASSLPQSFLLKCLEQVRKIQGDGAALQEKLVSECATYKLCHPEELVLLGHSLGIPWAPLSSCPSQALQLAGCLSQLHSGLFLYQGLLQALEGISPELGPTLDTLQLDVADFATTIWQQMEELGMAPALQPTQGAMPAFASAVQRRAGGVLVASHLQSFLEVSYRVLRHLAQP

SEQ ID NO: 112 - protein, 177 aa, Homo sapiens
  CSF3_R169H
TPLGPASSLPQSFLLKCLEQVRKIQGDGAALQEKLVSECATYKLCHPEELVLLGHSLGIPWAPLSSCPSQALQLAGCLSQLHSGLFLYQGLLQALEGISPELGPTLDTLQLDVADFATTIWQQMEELGMAPALQPTQGAMPAFASAFQRRAGGVLVASHLQSFLEVSYHVLRHLAQP

SEQ ID NO: 113 - protein, 177 aa, Homo sapiens
  CSF3_R169Q
TPLGPASSLPQSFLLKCLEQVRKIQGDGAALQEKLVSECATYKLCHPEELVLLGHSLGIPWAPLSSCPSQALQLAGCLSQLHSGLFLYQGLLQALEGISPELGPTLDTLQLDVADFATTIWQQMEELGMAPALQPTQGAMPAFASAFQRRAGGVLVASHLQSFLEVSYQVLRHLAQP

SEQ ID NO: 114 - protein, 177 aa, Homo sapiens
  CSF3_R172H
TPLGPASSLPQSFLLKCLEQVRKIQGDGAALQEKLVSECATYKLCHPEELVLLGHSLGIPWAPLSSCPSQALQLAGCLSQLHSGLFLYQGLLQALEGISPELGPTLDTLQLDVADFATTIWQQMEELGMAPALQPTQGAMPAFASAFQRRAGGVLVASHLQSFLEVSYRVLHHLAQP

SEQ ID NO: 115 - protein, 177 aa, Homo sapiens
  CSF3_R172Q
TPLGPASSLPQSFLLKCLEQVRKIQGDGAALQEKLVSECATYKLCHPEELVLLGHSLGIPWAPLSSCPSQALQLAGCLSQLHSGLFLYQGLLQALEGISPELGPTLDTLQLDVADFATTIWQQMEELGMAPALQPTQGAMPAFASAFQRRAGGVLVASHLQSFLEVSYRVLQHLAQP

SEQ ID NO: 116 - protein, 177 aa, Homo sapiens
  CSF3_P177A
TPLGPASSLPQSFLLKCLEQVRKIQGDGAALQEKLVSECATYKLCHPEELVLLGHSLGIPWAPLSSCPSQALQLAGCLSQLHSGLFLYQGLLQALEGISPELGPTLDTLQLDVADFATTIWQQMEELGMAPALQPTQGAMPAFASAFQRRAGGVLVASHLQSFLEVSYRVLRHLAQA

SEQ ID NO: 117 - protein, 177 aa, Homo sapiens
  CSF3_P177S
TPLGPASSLPQSFLLKCLEQVRKIQGDGAALQEKLVSECATYKLCHPEELVLLGHSLGIPWAPLSSCPSQALQLAGCLSQLHSGLFLYQGLLQALEGISPELGPTLDTLQLDVADFATTIWQQMEELGMAPALQPTQGAMPAFASAFQRRAGGVLVASHLQSFLEVSYRVLRHLAQS

SEQ ID NO: 118 - protein, 209 aa, Homo sapiens
  FLT3L_WT
TQDCSFQHSPISSDFAVKIRELSDYLLQDYPVTVASNLQDEELCGGLWRLVLAQRWMERLKTVAGSKMQGLLERVNTEIHFVTKCAFQPPPSCLRFVQTNISRLLQETSEQLVALKPWITRQNFSRCLELQCQPDSSTLPPPWSPRPLEATAPTAPQPPLLLLLLLPVGLLLLAAAWCLHWQRTRRRTPRPGEQVPPVPSPQDLLLVEH

SEQ ID NO: 119 - protein, 209 aa, Homo sapiens
  FLT3L_D3N
TQNCSFQHSPISSDFAVKIRELSDYLLQDYPVTVASNLQDEELCGGLWRLVLAQRWMERLKTVAGSKMQGLLERVNTEIHFVTKCAFQPPPSCLRFVQTNISRLLQETSEQLVALKPWITRQNFSRCLELQCQPDSSTLPPPWSPRPLEATAPTAPQPPLLLLLLLPVGLLLLAAAWCLHWQRTRRRTPRPGEQVPPVPSPQDLLLVEH

SEQ ID NO: 120 - protein, 209 aa, Homo sapiens
  FLT3L_D3Q
TQQCSFQHSPISSDFAVKIRELSDYLLQDYPVTVASNLQDEELCGGLWRLVLAQRWMERLKTVAGSKMQGLLERVNTEIHFVTKCAFQPPPSCLRFVQTNISRLLQETSEQLVALKPWITRQNFSRCLELQCQPDSSTLPPPWSPRPLEATAPTAPQPPLLLLLLLPVGLLLLAAAWCLHWQRTRRRTPRPGEQVPPVPSPQDLLLVEH

SEQ ID NO: 121 - protein, 209 aa, Homo sapiens
  FLT3L_D40N
TQDCSFQHSPISSDFAVKIRELSDYLLQDYPVTVASNLQNEELCGGLWRLVLAQRWMERLKTVAGSKMQGLLERVNTEIHFVTKCAFQPPPSCLRFVQTNISRLLQETSEQLVALKPWITRQNFSRCLELQCQPDSSTLPPPWSPRPLEATAPTAPQPPLLLLLLLPVGLLLLAAAWCLHWQRTRRRTPRPGEQVPPVPSPQDLLLVEH

SEQ ID NO: 122 - protein, 209 aa, Homo sapiens
  FLT3L_D40Q
TQDCSFQHSPISSDFAVKIRELSDYLLQDYPVTVASNLQQEELCGGLWRLVLAQRWMERLKTVAGSKMQGLLERVNTEIHFVTKCAFQPPPSCLRFVQTNISRLLQETSEQLVALKPWITRQNFSRCLELQCQPDSSTLPPPWSPRPLEATAPTAPQPPLLLLLLLPVGLLLLAAAWCLHWQRTRRRTPRPGEQVPPVPSPQDLLLVEH

SEQ ID NO: 123 - protein, 209 aa, Homo sapiens
  FLT3L_E42N
TQDCSFQHSPISSDFAVKIRELSDYLLQDYPVTVASNLQDENLCGGLWRLVLAQRWMERLKTVAGSKMQGLLERVNTEIHFVTKCAFQPPPSCLRFVQTNISRLLQETSEQLVALKPWITRQNFSRCLELQCQPDSSTLPPPWSPRPLEATAPTAPQPPLLLLLLLPVGLLLLAAAWCLHWQRTRRRTPRPGEQVPPVPSPQDLLLVEH

SEQ ID NO: 124 - protein, 209 aa, Homo sapiens
  FLT3L_E42Q
TQDCSFQHSPISSDFAVKIRELSDYLLQDYPVTVASNLQDEQLCGGLWRLVLAQRWMERLKTVAGSKMQGLLERVNTEIHFVTKCAFQPPPSCLRFVQTNISRLLQETSEQLVALKPWITRQNFSRCLELQCQPDSSTLPPPWSPRPLEATAPTAPQPPLLLLLLLPVGLLLLAAAWCLHWQRTRRRTPRPGEQVPPVPSPQDLLLVEH

SEQ ID NO: 125 - protein, 209 aa, Homo sapiens
  FLT3L_E42H
TQDCSFQHSPISSDFAVKIRELSDYLLQDYPVTVASNLQDEHLCGGLWRLVLAQRWMERLKTVAGSKMQGLLERVNTEIHFVTKCAFQPPPSCLRFVQTNISRLLQETSEQLVALKPWITRQNFSRCLELQCQPDSSTLPPPWSPRPLEATAPTAPQPPLLLLLLLPVGLLLLAAAWCLHWQRTRRRTPRPGEQVPPVPSPQDLLLVEH

SEQ ID NO: 126 - protein, 209 aa, Homo sapiens
  FLT3L_L43I
TQDCSFQHSPISSDFAVKIRELSDYLLQDYPVTVASNLQDEEICGGLWRLVLAQRWMERLKTVAGSKMQGLLERVNTEIHFVTKCAFQPPPSCLRFVQTNISRLLQETSEQLVALKPWITRQNFSRCLELQCQPDSSTLPPPWSPRPLEATAPTAPQPPLLLLLLLPVGLLLLAAAWCLHWQRTRRRTPRPGEQVPPVPSPQDLLLVEH

SEQ ID NO: 127 - protein, 209 aa, Homo sapiens
  FLT3L_L43V
TQDCSFQHSPISSDFAVKIRELSDYLLQDYPVTVASNLQDEEVCGGLWRLVLAQRWMERLKTVAGSKMQGLLERVNTEIHFVTKCAFQPPPSCLRFVQTNISRLLQETSEQLVALKPWITRQNFSRCLELQCQPDSSTLPPPWSPRPLEATAPTAPQPPLLLLLLLPVGLLLLAAAWCLHWQRTRRRTPRPGEQVPPVPSPQDLLLVEH

SEQ ID NO: 128 - protein, 209 aa, Homo sapiens
  FLT3L_R55H
TQDCSFQHSPISSDFAVKIRELSDYLLQDYPVTVASNLQDEELCGGLWRLVLAQHWMERLKTVAGSKMQGLLERVNTEIHFVTKCAFQPPPSCLRFVQTNISRLLQETSEQLVALKPWITRQNFSRCLELQCQPDSSTLPPPWSPRPLEATAPTAPQPPLLLLLLLPVGLLLLAAAWCLHWQRTRRRTPRPGEQVPPVPSPQDLLLVEH

SEQ ID NO: 129 - protein, 209 aa, Homo sapiens
  FLT3L_R55Q
TQDCSFQHSPISSDFAVKIRELSDYLLQDYPVTVASNLQDEELCGGLWRLVLAQQWMERLKTVAGSKMQGLLERVNTEIHFVTKCAFQPPPSCLRFVQTNISRLLQETSEQLVALKPWITRQNFSRCLELQCQPDSSTLPPPWSPRPLEATAPTAPQPPLLLLLLLPVGLLLLAAAWCLHWQRTRRRTPRPGEQVPPVPSPQDLLLVEH

SEQ ID NO: 130 - protein, 209 aa, Homo sapiens
  FLT3L_E58N
TQDCSFQHSPISSDFAVKIRELSDYLLQDYPVTVASNLQDEELCGGLWRLVLAQRWMNRLKTVAGSKMQGLLERVNTEIHFVTKCAFQPPPSCLRFVQTNISRLLQETSEQLVALKPWITRQNFSRCLELQCQPDSSTLPPPWSPRPLEATAPTAPQPPLLLLLLLPVGLLLLAAAWCLHWQRTRRRTPRPGEQVPPVPSPQDLLLVEH

SEQ ID NO: 131 - protein, 209 aa, Homo sapiens
  FLT3L_E58Q
TQDCSFQHSPISSDFAVKIRELSDYLLQDYPVTVASNLQDEELCGGLWRLVLAQRWMQRLKTVAGSKMQGLLERVNTEIHFVTKCAFQPPPSCLRFVQTNISRLLQETSEQLVALKPWITRQNFSRCLELQCQPDSSTLPPPWSPRPLEATAPTAPQPPLLLLLLLPVGLLLLAAAWCLHWQRTRRRTPRPGEQVPPVPSPQDLLLVEH

SEQ ID NO: 132 - protein, 209 aa, Homo sapiens
  FLT3L_E58H
TQDCSFQHSPISSDFAVKIRELSDYLLQDYPVTVASNLQDEELCGGLWRLVLAQRWMHRLKTVAGSKMQGLLERVNTEIHFVTKCAFQPPPSCLRFVQTNISRLLQETSEQLVALKPWITRQNFSRCLELQCQPDSSTLPPPWSPRPLEATAPTAPQPPLLLLLLLPVGLLLLAAAWCLHWQRTRRRTPRPGEQVPPVPSPQDLLLVEH

SEQ ID NO: 133 - protein, 209 aa, Homo sapiens
  FLT3L_R59H
TQDCSFQHSPISSDFAVKIRELSDYLLQDYPVTVASNLQDEELCGGLWRLVLAQRWMEHLKTVAGSKMQGLLERVNTEIHFVTKCAFQPPPSCLRFVQTNISRLLQETSEQLVALKPWITRQNFSRCLELQCQPDSSTLPPPWSPRPLEATAPTAPQPPLLLLLLLPVGLLLLAAAWCLHWQRTRRRTPRPGEQVPPVPSPQDLLLVEH

SEQ ID NO: 134 - protein, 209 aa, Homo sapiens
  FLT3L_R59Q
TQDCSFQHSPISSDFAVKIRELSDYLLQDYPVTVASNLQDEELCGGLWRLVLAQRWMEQLKTVAGSKMQGLLERVNTEIHFVTKCAFQPPPSCLRFVQTNISRLLQETSEQLVALKPWITRQNFSRCLELQCQPDSSTLPPPWSPRPLEATAPTAPQPPLLLLLLLPVGLLLLAAAWCLHWQRTRRRTPRPGEQVPPVPSPQDLLLVEH

SEQ ID NO: 135 - protein, 209 aa, Homo sapiens
  FLT3L_K61N
TQDCSFQHSPISSDFAVKIRELSDYLLQDYPVTVASNLQDEELCGGLWRLVLAQRWMERLNTVAGSKMQGLLERVNTEIHFVTKCAFQPPPSCLRFVQTNISRLLQETSEQLVALKPWITRQNFSRCLELQCQPDSSTLPPPWSPRPLEATAPTAPQPPLLLLLLLPVGLLLLAAAWCLHWQRTRRRTPRPGEQVPPVPSPQDLLLVEH

SEQ ID NO: 136 - protein, 209 aa, Homo sapiens
  FLT3L_K61Q
TQDCSFQHSPISSDFAVKIRELSDYLLQDYPVTVASNLQDEELCGGLWRLVLAQRWMERLQTVAGSKMQGLLERVNTEIHFVTKCAFQPPPSCLRFVQTNISRLLQETSEQLVALKPWITRQNFSRCLELQCQPDSSTLPPPWSPRPLEATAPTAPQPPLLLLLLLPVGLLLLAAAWCLHWQRTRRRTPRPGEQVPPVPSPQDLLLVEH

SEQ ID NO: 137 - protein, 209 aa, Homo sapiens
  FLT3L_P89A
TQDCSFQHSPISSDFAVKIRELSDYLLQDYPVTVASNLQDEELCGGLWRLVLAQRWMERLKTVAGSKMQGLLERVNTEIHFVTKCAFQAPPSCLRFVQTNISRLLQETSEQLVALKPWITRQNFSRCLELQCQPDSSTLPPPWSPRPLEATAPTAPQPPLLLLLLLPVGLLLLAAAWCLHWQRTRRRTPRPGEQVPPVPSPQDLLLVEH

SEQ ID NO: 138 - protein, 209 aa, Homo sapiens
  FLT3L_P89S
TQDCSFQHSPISSDFAVKIRELSDYLLQDYPVTVASNLQDEELCGGLWRLVLAQRWMERLKTVAGSKMQGLLERVNTEIHFVTKCAFQSPPSCLRFVQTNISRLLQETSEQLVALKPWITRQNFSRCLELQCQPDSSTLPPPWSPRPLEATAPTAPQPPLLLLLLLPVGLLLLAAAWCLHWQRTRRRTPRPGEQVPPVPSPQDLLLVEH

SEQ ID NO: 139 - protein, 209 aa, Homo sapiens
  FLT3L_P90A
TQDCSFQHSPISSDFAVKIRELSDYLLQDYPVTVASNLQDEELCGGLWRLVLAQRWMERLKTVAGSKMQGLLERVNTEIHFVTKCAFQPAPSCLRFVQTNISRLLQETSEQLVALKPWITRQNFSRCLELQCQPDSSTLPPPWSPRPLEATAPTAPQPPLLLLLLLPVGLLLLAAAWCLHWQRTRRRTPRPGEQVPPVPSPQDLLLVEH

SEQ ID NO: 140 - protein, 209 aa, Homo sapiens
  FLT3L_P90S
TQDCSFQHSPISSDFAVKIRELSDYLLQDYPVTVASNLQDEELCGGLWRLVLAQRWMERLKTVAGSKMQGLLERVNTEIHFVTKCAFQPSPSCLRFVQTNISRLLQETSEQLVALKPWITRQNFSRCLELQCQPDSSTLPPPWSPRPLEATAPTAPQPPLLLLLLLPVGLLLLAAAWCLHWQRTRRRTPRPGEQVPPVPSPQDLLLVEH

SEQ ID NO: 141 - protein, 209 aa, Homo sapiens
  FLT3L_P91A
TQDCSFQHSPISSDFAVKIRELSDYLLQDYPVTVASNLQDEELCGGLWRLVLAQRWMERLKTVAGSKMQGLLERVNTEIHFVTKCAFQPPASCLRFVQTNISRLLQETSEQLVALKPWITRQNFSRCLELQCQPDSSTLPPPWSPRPLEATAPTAPQPPLLLLLLLPVGLLLLAAAWCLHWQRTRRRTPRPGEQVPPVPSPQDLLLVEH

SEQ ID NO: 142 - protein, 209 aa, Homo sapiens
  FLT3L_P91S
TQDCSFQHSPISSDFAVKIRELSDYLLQDYPVTVASNLQDEELCGGLWRLVLAQRWMERLKTVAGSKMQGLLERVNTEIHFVTKCAFQPPSSCLRFVQTNISRLLQETSEQLVALKPWITRQNFSRCLELQCQPDSSTLPPPWSPRPLEATAPTAPQPPLLLLLLLPVGLLLLAAAWCLHWQRTRRRTPRPGEQVPPVPSPQDLLLVEH

SEQ ID NO: 143 - protein, 209 aa, Homo sapiens
  FLT3L_R95H
TQDCSFQHSPISSDFAVKIRELSDYLLQDYPVTVASNLQDEELCGGLWRLVLAQRWMERLKTVAGSKMQGLLERVNTEIHFVTKCAFQPPPSCLHFVQTNISRLLQETSEQLVALKPWITRQNFSRCLELQCQPDSSTLPPPWSPRPLEATAPTAPQPPLLLLLLLPVGLLLLAAAWCLHWQRTRRRTPRPGEQVPPVPSPQDLLLVEH

SEQ ID NO: 144 - protein, 209 aa, Homo sapiens
  FLT3L_R95Q
TQDCSFQHSPISSDFAVKIRELSDYLLQDYPVTVASNLQDEELCGGLWRLVLAQRWMERLKTVAGSKMQGLLERVNTEIHFVTKCAFQPPPSCLQFVQTNISRLLQETSEQLVALKPWITRQNFSRCLELQCQPDSSTLPPPWSPRPLEATAPTAPQPPLLLLLLLPVGLLLLAAAWCLHWQRTRRRTPRPGEQVPPVPSPQDLLLVEH

SEQ ID NO: 145 - protein, 209 aa, Homo sapiens
  FLT3L_F96I
TQDCSFQHSPISSDFAVKIRELSDYLLQDYPVTVASNLQDEELCGGLWRLVLAQRWMERLKTVAGSKMQGLLERVNTEIHFVTKCAFQPPPSCLRIVQTNISRLLQETSEQLVALKPWITRQNFSRCLELQCQPDSSTLPPPWSPRPLEATAPTAPQPPLLLLLLLPVGLLLLAAAWCLHWQRTRRRTPRPGEQVPPVPSPQDLLLVEH

SEQ ID NO: 146 - protein, 209 aa, Homo sapiens
  FLT3L_F96V
TQDCSFQHSPISSDFAVKIRELSDYLLQDYPVTVASNLQDEELCGGLWRLVLAQRWMERLKTVAGSKMQGLLERVNTEIHFVTKCAFQPPPSCLRVVQTNISRLLQETSEQLVALKPWITRQNFSRCLELQCQPDSSTLPPPWSPRPLEATAPTAPQPPLLLLLLLPVGLLLLAAAWCLHWQRTRRRTPRPGEQVPPVPSPQDLLLVEH

SEQ ID NO: 147 - protein, 166 aa, Homo sapiens
  IFNB_WT
MSYNLLGFLQRSSNFQCQKLLWQLNGRLEYCLKDRMNFDIPEEIKQLQQFQKEDAALTIYEMLQNIFAIFRQDSSSTGWNETIVENLLANVYHQINHLKTVLEEKLEKEDFTRGKLMSSLHLKRYYGRILHYLKAKEYSHCAWTIVRVEILRNFYFINRLTGYLRN

SEQ ID NO: 148 - protein, 166 aa, Homo sapiens
  IFNB_M1I
ISYNLLGFLQRSSNFQCQKLLWQLNGRLEYCLKDRMNFDIPEEIKQLQQFQKEDAALTIYEMLQNIFAIFRQDSSSTGWNETIVENLLANVYHQINHLKTVLEEKLEKEDFTRGKLMSSLHLKRYYGRILHYLKAKEYSHCAWTIVRVEILRNFYFINRLTGYLRN

SEQ ID NO: 149 - protein, 166 aa, Homo sapiens
  IFNB_M1V
VSYNLLGFLQRSSNFQCQKLLWQLNGRLEYCLKDRMNFDIPEEIKQLQQFQKEDAALTIYEMLQNIFAIFRQDSSSTGWNETIVENLLANVYHQINHLKTVLEEKLEKEDFTRGKLMSSLHLKRYYGRILHYLKAKEYSHCAWTIVRVEILRNFYFINRLTGYLRN

SEQ ID NO: 150 - protein, 166 aa, Homo sapiens
  IFNB_M1T
TSYNLLGFLQRSSNFQCQKLLWQLNGRLEYCLKDRMNFDIPEEIKQLQQFQKEDAALTIYEMLQNIFAIFRQDSSSTGWNETIVENLLANVYHQINHLKTVLEEKLEKEDFTRGKLMSSLHLKRYYGRILHYLKAKEYSHCAWTIVRVEILRNFYFINRLTGYLRN

SEQ ID NO: 151 - protein, 166 aa, Homo sapiens
  IFNB_M1Q
QSYNLLGFLQRSSNFQCQKLLWQLNGRLEYCLKDRMNFDIPEEIKQLQQFQKEDAALTIYEMLQNIFAIFRQDSSSTGWNETIVENLLANVYHQINHLKTVLEEKLEKEDFTRGKLMSSLHLKRYYGRILHYLKAKEYSHCAWTIVRVEILRNFYFINRLTGYLRN

SEQ ID NO: 152 - protein, 166 aa, Homo sapiens
  IFNB_M1A
ASYNLLGFLQRSSNFQCQKLLWQLNGRLEYCLKDRMNFDIPEEIKQLQQFQKEDAALTIYEMLQNIFAIFRQDSSSTGWNETIVENLLANVYHQINHLKTVLEEKLEKEDFTRGKLMSSLHLKRYYGRILHYLKAKEYSHCAWTIVRVEILRNFYFINRLTGYLRN

SEQ ID NO: 153 - protein, 166 aa, Homo sapiens
  IFNB_Y3H
MSHNLLGFLQRSSNFQCQKLLWQLNGRLEYCLKDRMNFDIPEEIKQLQQFQKEDAALTIYEMLQNIFAIFRQDSSSTGWNETIVENLLANVYHQINHLKTVLEEKLEKEDFTRGKLMSSLHLKRYYGRILHYLKAKEYSHCAWTIVRVEILRNFYFINRLTGYLRN

SEQ ID NO: 154 - protein, 166 aa, Homo sapiens
  IFNB_Y3I
MSINLLGFLQRSSNFQCQKLLWQLNGRLEYCLKDRMNFDIPEEIKQLQQFQKEDAALTIYEMLQNIFAIFRQDSSSTGWNETIVENLLANVYHQINHLKTVLEEKLEKEDFTRGKLMSSLHLKRYYGRILHYLKAKEYSHCAWTIVRVEILRNFYFINRLTGYLRN

SEQ ID NO: 155 - protein, 166 aa, Homo sapiens
  IFNB_L5I
MSYNILGFLQRSSNFQCQKLLWQLNGRLEYCLKDRMNFDIPEEIKQLQQFQKEDAALTIYEMLQNIFAIFRQDSSSTGWNETIVENLLANVYHQINHLKTVLEEKLEKEDFTRGKLMSSLHLKRYYGRILHYLKAKEYSHCAWTIVRVEILRNFYFINRLTGYLRN

SEQ ID NO: 156 - protein, 166 aa, Homo sapiens
  IFNB_L5V
MSYNVLGFLQRSSNFQCQKLLWQLNGRLEYCLKDRMNFDIPEEIKQLQQFQKEDAALTIYEMLQNIFAIFRQDSSSTGWNETIVENLLANVYHQINHLKTVLEEKLEKEDFTRGKLMSSLHLKRYYGRILHYLKAKEYSHCAWTIVRVEILRNFYFINRLTGYLRN

SEQ ID NO: 157 - protein, 166 aa, Homo sapiens
  IFNB_L5T
MSYNTLGFLQRSSNFQCQKLLWQLNGRLEYCLKDRMNFDIPEEIKQLQQFQKEDAALTIYEMLQNIFAIFRQDSSSTGWNETIVENLLANVYHQINHLKTVLEEKLEKEDFTRGKLMSSLHLKRYYGRILHYLKAKEYSHCAWTIVRVEILRNFYFINRLTGYLRN

SEQ ID NO: 158 - protein, 166 aa, Homo sapiens
  IFNB_L5Q
MSYNQLGFLQRSSNFQCQKLLWQLNGRLEYCLKDRMNFDIPEEIKQLQQFQKEDAALTIYEMLQNIFAIFRQDSSSTGWNETIVENLLANVYHQINHLKTVLEEKLEKEDFTRGKLMSSLHLKRYYGRILHYLKAKEYSHCAWTIVRVEILRNFYFINRLTGYLRN

SEQ ID NO: 159 - protein, 166 aa, Homo sapiens
  IFNB_L5H
MSYNHLGFLQRSSNFQCQKLLWQLNGRLEYCLKDRMNFDIPEEIKQLQQFQKEDAALTIYEMLQNIFAIFRQDSSSTGWNETIVENLLANVYHQINHLKTVLEEKLEKEDFTRGKLMSSLHLKRYYGRILHYLKAKEYSHCAWTIVRVEILRNFYFINRLTGYLRN

SEQ ID NO: 160 - protein, 166 aa, Homo sapiens
  IFNB_L5A
MSYNALGFLQRSSNFQCQKLLWQLNGRLEYCLKDRMNFDIPEEIKQLQQFQKEDAALTIYEMLQNIFAIFRQDSSSTGWNETIVENLLANVYHQINHLKTVLEEKLEKEDFTRGKLMSSLHLKRYYGRILHYLKAKEYSHCAWTIVRVEILRNFYFINRLTGYLRN

SEQ ID NO: 161 - protein, 166 aa, Homo sapiens
  IFNB_L6I
MSYNLIGFLQRSSNFQCQKLLWQLNGRLEYCLKDRMNFDIPEEIKQLQQFQKEDAALTIYEMLQNIFAIFRQDSSSTGWNETIVENLLANVYHQINHLKTVLEEKLEKEDFTRGKLMSSLHLKRYYGRILHYLKAKEYSHCAWTIVRVEILRNFYFINRLTGYLRN

SEQ ID NO: 162 - protein, 166 aa, Homo sapiens
  IFNB_L6V
MSYNLVGFLQRSSNFQCQKLLWQLNGRLEYCLKDRMNFDIPEEIKQLQQFQKEDAALTIYEMLQNIFAIFRQDSSSTGWNETIVENLLANVYHQINHLKTVLEEKLEKEDFTRGKLMSSLHLKRYYGRILHYLKAKEYSHCAWTIVRVEILRNFYFINRLTGYLRN

SEQ ID NO: 163 - protein, 166 aa, Homo sapiens
  IFNB_F8I
MSYNLLGILQRSSNFQCQKLLWQLNGRLEYCLKDRMNFDIPEEIKQLQQFQKEDAALTIYEMLQNIFAIFRQDSSSTGWNETIVENLLANVYHQINHLKTVLEEKLEKEDFTRGKLMSSLHLKRYYGRILHYLKAKEYSHCAWTIVRVEILRNFYFINRLTGYLRN

SEQ ID NO: 164 - protein, 166 aa, Homo sapiens
  IFNB_F8V
MSYNLLGVLQRSSNFQCQKLLWQLNGRLEYCLKDRMNFDIPEEIKQLQQFQKEDAALTIYEMLQNIFAIFRQDSSSTGWNETIVENLLANVYHQINHLKTVLEEKLEKEDFTRGKLMSSLHLKRYYGRILHYLKAKEYSHCAWTIVRVEILRNFYFINRLTGYLRN

SEQ ID NO: 165 - protein, 166 aa, Homo sapiens
  IFNB_L9I
MSYNLLGFIQRSSNFQCQKLLWQLNGRLEYCLKDRMNFDIPEEIKQLQQFQKEDAALTIYEMLQNIFAIFRQDSSSTGWNETIVENLLANVYHQINHLKTVLEEKLEKEDFTRGKLMSSLHLKRYYGRILHYLKAKEYSHCAWTIVRVEILRNFYFINRLTGYLRN

SEQ ID NO: 166 - protein, 166 aa, Homo sapiens
  IFNB_L9V
MSYNLLGFVQRSSNFQCQKLLWQLNGRLEYCLKDRMNFDIPEEIKQLQQFQKEDAALTIYEMLQNIFAIFRQDSSSTGWNETIVENLLANVYHQINHLKTVLEEKLEKEDFTRGKLMSSLHLKRYYGRILHYLKAKEYSHCAWTIVRVEILRNFYFINRLTGYLRN

SEQ ID NO: 167 - protein, 166 aa, Homo sapiens
  IFNB_L9T
MSYNLLGFTQRSSNFQCQKLLWQLNGRLEYCLKDRMNFDIPEEIKQLQQFQKEDAALTIYEMLQNIFAIFRQDSSSTGWNETIVENLLANVYHQINHLKTVLEEKLEKEDFTRGKLMSSLHLKRYYGRILHYLKAKEYSHCAWTIVRVEILRNFYFINRLTGYLRN

SEQ ID NO: 168 - protein, 166 aa, Homo sapiens
  IFNB_L9Q
MSYNLLGFQQRSSNFQCQKLLWQLNGRLEYCLKDRMNFDIPEEIKQLQQFQKEDAALTIYEMLQNIFAIFRQDSSSTGWNETIVENLLANVYHQINHLKTVLEEKLEKEDFTRGKLMSSLHLKRYYGRILHYLKAKEYSHCAWTIVRVEILRNFYFINRLTGYLRN

SEQ ID NO: 169 - protein, 166 aa, Homo sapiens
  IFNB_L9H
MSYNLLGFHQRSSNFQCQKLLWQLNGRLEYCLKDRMNFDIPEEIKQLQQFQKEDAALTIYEMLQNIFAIFRQDSSSTGWNETIVENLLANVYHQINHLKTVLEEKLEKEDFTRGKLMSSLHLKRYYGRILHYLKAKEYSHCAWTIVRVEILRNFYFINRLTGYLRN

SEQ ID NO: 170 - protein, 166 aa, Homo sapiens
  IFNB_L9A
MSYNLLGFAQRSSNFQCQKLLWQLNGRLEYCLKDRMNFDIPEEIKQLQQFQKEDAALTIYEMLQNIFAIFRQDSSSTGWNETIVENLLANVYHQINHLKTVLEEKLEKEDFTRGKLMSSLHLKRYYGRILHYLKAKEYSHCAWTIVRVEILRNFYFINRLTGYLRN

SEQ ID NO: 171 - protein, 166 aa, Homo sapiens
  IFNB_R11H
MSYNLLGFLQHSSNFQCQKLLWQLNGRLEYCLKDRMNFDIPEEIKQLQQFQKEDAALTIYEMLQNIFAIFRQDSSSTGWNETIVENLLANVYHQINHLKTVLEEKLEKEDFTRGKLMSSLHLKRYYGRILHYLKAKEYSHCAWTIVRVEILRNFYFINRLTGYLRN

SEQ ID NO: 172 - protein, 166 aa, Homo sapiens
  IFNB_R11Q
MSYNLLGFLQQSSNFQCQKLLWQLNGRLEYCLKDRMNFDIPEEIKQLQQFQKEDAALTIYEMLQNIFAIFRQDSSSTGWNETIVENLLANVYHQINHLKTVLEEKLEKEDFTRGKLMSSLHLKRYYGRILHYLKAKEYSHCAWTIVRVEILRNFYFINRLTGYLRN

SEQ ID NO: 173 - protein, 166 aa, Homo sapiens
  IFNB_F15I
MSYNLLGFLQRSSNIQCQKLLWQLNGRLEYCLKDRMNFDIPEEIKQLQQFQKEDAALTIYEMLQNIFAIFRQDSSSTGWNETIVENLLANVYHQINHLKTVLEEKLEKEDFTRGKLMSSLHLKRYYGRILHYLKAKEYSHCAWTIVRVEILRNFYFINRLTGYLRN

SEQ ID NO: 174 - protein, 166 aa, Homo sapiens
  IFNB_F15V
MSYNLLGFLQRSSNVQCQKLLWQLNGRLEYCLKDRMNFDIPEEIKQLQQFQKEDAALTIYEMLQNIFAIFRQDSSSTGWNETIVENLLANVYHQINHLKTVLEEKLEKEDFTRGKLMSSLHLKRYYGRILHYLKAKEYSHCAWTIVRVEILRNFYFINRLTGYLRN

SEQ ID NO: 175 - protein, 166 aa, Homo sapiens
  IFNB_K19N
MSYNLLGFLQRSSNFQCQNLLWQLNGRLEYCLKDRMNFDIPEEIKQLQQFQKEDAALTIYEMLQNIFAIFRQDSSSTGWNETIVENLLANVYHQINHLKTVLEEKLEKEDFTRGKLMSSLHLKRYYGRILHYLKAKEYSHCAWTIVRVEILRNFYFINRLTGYLRN

SEQ ID NO: 176 - protein, 166 aa, Homo sapiens
  IFNB_K19Q
MSYNLLGFLQRSSNFQCQQLLWQLNGRLEYCLKDRMNFDIPEEIKQLQQFQKEDAALTIYEMLQNIFAIFRQDSSSTGWNETIVENLLANVYHQINHLKTVLEEKLEKEDFTRGKLMSSLHLKRYYGRILHYLKAKEYSHCAWTIVRVEILRNFYFINRLTGYLRN

SEQ ID NO: 177 - protein, 166 aa, Homo sapiens
  IFNB_K19T
MSYNLLGFLQRSSNFQCQTLLWQLNGRLEYCLKDRMNFDIPEEIKQLQQFQKEDAALTIYEMLQNIFAIFRQDSSSTGWNETIVENLLANVYHQINHLKTVLEEKLEKEDFTRGKLMSSLHLKRYYGRILHYLKAKEYSHCAWTIVRVEILRNFYFINRLTGYLRN

SEQ ID NO: 178 - protein, 166 aa, Homo sapiens
  IFNB_K19S
MSYNLLGFLQRSSNFQCQSLLWQLNGRLEYCLKDRMNFDIPEEIKQLQQFQKEDAALTIYEMLQNIFAIFRQDSSSTGWNETIVENLLANVYHQINHLKTVLEEKLEKEDFTRGKLMSSLHLKRYYGRILHYLKAKEYSHCAWTIVRVEILRNFYFINRLTGYLRN

SEQ ID NO: 179 - protein, 166 aa, Homo sapiens
  IFNB_K19H
MSYNLLGFLQRSSNFQCQHLLWQLNGRLEYCLKDRMNFDIPEEIKQLQQFQKEDAALTIYEMLQNIFAIFRQDSSSTGWNETIVENLLANVYHQINHLKTVLEEKLEKEDFTRGKLMSSLHLKRYYGRILHYLKAKEYSHCAWTIVRVEILRNFYFINRLTGYLRN

SEQ ID NO: 180 - protein, 166 aa, Homo sapiens
  IFNB_L20I
MSYNLLGFLQRSSNFQCQKILWQLNGRLEYCLKDRMNFDIPEEIKQLQQFQKEDAALTIYEMLQNIFAIFRQDSSSTGWNETIVENLLANVYHQINHLKTVLEEKLEKEDFTRGKLMSSLHLKRYYGRILHYLKAKEYSHCAWTIVRVEILRNFYFINRLTGYLRN

SEQ ID NO: 181 - protein, 166 aa, Homo sapiens
  IFNB_L20V
MSYNLLGFLQRSSNFQCQKVLWQLNGRLEYCLKDRMNFDIPEEIKQLQQFQKEDAALTIYEMLQNIFAIFRQDSSSTGWNETIVENLLANVYHQINHLKTVLEEKLEKEDFTRGKLMSSLHLKRYYGRILHYLKAKEYSHCAWTIVRVEILRNFYFINRLTGYLRN

SEQ ID NO: 182 - protein, 166 aa, Homo sapiens
  IFNB_L21I
MSYNLLGFLQRSSNFQCQKLIWQLNGRLEYCLKDRMNFDIPEEIKQLQQFQKEDAALTIYEMLQNIFAIFRQDSSSTGWNETIVENLLANVYHQINHLKTVLEEKLEKEDFTRGKLMSSLHLKRYYGRILHYLKAKEYSHCAWTIVRVEILRNFYFINRLTGYLRN

SEQ ID NO: 183 - protein, 166 aa, Homo sapiens
  IFNB_L21V
MSYNLLGFLQRSSNFQCQKLVWQLNGRLEYCLKDRMNFDIPEEIKQLQQFQKEDAALTIYEMLQNIFAIFRQDSSSTGWNETIVENLLANVYHQINHLKTVLEEKLEKEDFTRGKLMSSLHLKRYYGRILHYLKAKEYSHCAWTIVRVEILRNFYFINRLTGYLRN

SEQ ID NO: 184 - protein, 166 aa, Homo sapiens
  IFNB_W22S
MSYNLLGFLQRSSNFQCQKLLSQLNGRLEYCLKDRMNFDIPEEIKQLQQFQKEDAALTIYEMLQNIFAIFRQDSSSTGWNETIVENLLANVYHQINHLKTVLEEKLEKEDFTRGKLMSSLHLKRYYGRILHYLKAKEYSHCAWTIVRVEILRNFYFINRLTGYLRN

SEQ ID NO: 185 - protein, 166 aa, Homo sapiens
  IFNB_W22H
MSYNLLGFLQRSSNFQCQKLLHQLNGRLEYCLKDRMNFDIPEEIKQLQQFQKEDAALTIYEMLQNIFAIFRQDSSSTGWNETIVENLLANVYHQINHLKTVLEEKLEKEDFTRGKLMSSLHLKRYYGRILHYLKAKEYSHCAWTIVRVEILRNFYFINRLTGYLRN

SEQ ID NO: 186 - protein, 166 aa, Homo sapiens
  IFNB_L24I
MSYNLLGFLQRSSNFQCQKLLWQINGRLEYCLKDRMNFDIPEEIKQLQQFQKEDAALTIYEMLQNIFAIFRQDSSSTGWNETIVENLLANVYHQINHLKTVLEEKLEKEDFTRGKLMSSLHLKRYYGRILHYLKAKEYSHCAWTIVRVEILRNFYFINRLTGYLRN

SEQ ID NO: 187 - protein, 166 aa, Homo sapiens
  IFNB_L24V
MSYNLLGFLQRSSNFQCQKLLWQVNGRLEYCLKDRMNFDIPEEIKQLQQFQKEDAALTIYEMLQNIFAIFRQDSSSTGWNETIVENLLANVYHQINHLKTVLEEKLEKEDFTRGKLMSSLHLKRYYGRILHYLKAKEYSHCAWTIVRVEILRNFYFINRLTGYLRN

SEQ ID NO: 188 - protein, 166 aa, Homo sapiens
  IFNB_N25H
MSYNLLGFLQRSSNFQCQKLLWQLHGRLEYCLKDRMNFDIPEEIKQLQQFQKEDAALTIYEMLQNIFAIFRQDSSSTGWNETIVENLLANVYHQINHLKTVLEEKLEKEDFTRGKLMSSLHLKRYYGRILHYLKAKEYSHCAWTIVRVEILRNFYFINRLTGYLRN

SEQ ID NO: 189 - protein, 166 aa, Homo sapiens
  IFNB_N25Q
MSYNLLGFLQRSSNFQCQKLLWQLQGRLEYCLKDRMNFDIPEEIKQLQQFQKEDAALTIYEMLQNIFAIFRQDSSSTGWNETIVENLLANVYHQINHLKTVLEEKLEKEDFTRGKLMSSLHLKRYYGRILHYLKAKEYSHCAWTIVRVEILRNFYFINRLTGYLRN

SEQ ID NO: 190 - protein, 166 aa, Homo sapiens
  IFNB_N25S
MSYNLLGFLQRSSNFQCQKLLWQLSGRLEYCLKDRMNFDIPEEIKQLQQFQKEDAALTIYEMLQNIFAIFRQDSSSTGWNETIVENLLANVYHQINHLKTVLEEKLEKEDFTRGKLMSSLHLKRYYGRILHYLKAKEYSHCAWTIVRVEILRNFYFINRLTGYLRN

SEQ ID NO: 191 - protein, 166 aa, Homo sapiens
  IFNB_R27H
MSYNLLGFLQRSSNFQCQKLLWQLNGHLEYCLKDRMNFDIPEEIKQLQQFQKEDAALTIYEMLQNIFAIFRQDSSSTGWNETIVENLLANVYHQINHLKTVLEEKLEKEDFTRGKLMSSLHLKRYYGRILHYLKAKEYSHCAWTIVRVEILRNFYFINRLTGYLRN

SEQ ID NO: 192 - protein, 166 aa, Homo sapiens
  IFNB_R27Q
MSYNLLGFLQRSSNFQCQKLLWQLNGQLEYCLKDRMNFDIPEEIKQLQQFQKEDAALTIYEMLQNIFAIFRQDSSSTGWNETIVENLLANVYHQINHLKTVLEEKLEKEDFTRGKLMSSLHLKRYYGRILHYLKAKEYSHCAWTIVRVEILRNFYFINRLTGYLRN

SEQ ID NO: 193 - protein, 166 aa, Homo sapiens
  IFNB_L28I
MSYNLLGFLQRSSNFQCQKLLWQLNGRIEYCLKDRMNFDIPEEIKQLQQFQKEDAALTIYEMLQNIFAIFRQDSSSTGWNETIVENLLANVYHQINHLKTVLEEKLEKEDFTRGKLMSSLHLKRYYGRILHYLKAKEYSHCAWTIVRVEILRNFYFINRLTGYLRN

SEQ ID NO: 194 - protein, 166 aa, Homo sapiens
  IFNB_L28V
MSYNLLGFLQRSSNFQCQKLLWQLNGRVEYCLKDRMNFDIPEEIKQLQQFQKEDAALTIYEMLQNIFAIFRQDSSSTGWNETIVENLLANVYHQINHLKTVLEEKLEKEDFTRGKLMSSLHLKRYYGRILHYLKAKEYSHCAWTIVRVEILRNFYFINRLTGYLRN

SEQ ID NO: 195 - protein, 166 aa, Homo sapiens
  IFNB_L28T
MSYNLLGFLQRSSNFQCQKLLWQLNGRTEYCLKDRMNFDIPEEIKQLQQFQKEDAALTIYEMLQNIFAIFRQDSSSTGWNETIVENLLANVYHQINHLKTVLEEKLEKEDFTRGKLMSSLHLKRYYGRILHYLKAKEYSHCAWTIVRVEILRNFYFINRLTGYLRN

SEQ ID NO: 196 - protein, 166 aa, Homo sapiens
  IFNB_L28Q
MSYNLLGFLQRSSNFQCQKLLWQLNGRQEYCLKDRMNFDIPEEIKQLQQFQKEDAALTIYEMLQNIFAIFRQDSSSTGWNETIVENLLANVYHQINHLKTVLEEKLEKEDFTRGKLMSSLHLKRYYGRILHYLKAKEYSHCAWTIVRVEILRNFYFINRLTGYLRN

SEQ ID NO: 197 - protein, 166 aa, Homo sapiens
  IFNB_L28H
MSYNLLGFLQRSSNFQCQKLLWQLNGRHEYCLKDRMNFDIPEEIKQLQQFQKEDAALTIYEMLQNIFAIFRQDSSSTGWNETIVENLLANVYHQINHLKTVLEEKLEKEDFTRGKLMSSLHLKRYYGRILHYLKAKEYSHCAWTIVRVEILRNFYFINRLTGYLRN

SEQ ID NO: 198 - protein, 166 aa, Homo sapiens
  IFNB_L28A
MSYNLLGFLQRSSNFQCQKLLWQLNGRAEYCLKDRMNFDIPEEIKQLQQFQKEDAALTIYEMLQNIFAIFRQDSSSTGWNETIVENLLANVYHQINHLKTVLEEKLEKEDFTRGKLMSSLHLKRYYGRILHYLKAKEYSHCAWTIVRVEILRNFYFINRLTGYLRN

SEQ ID NO: 199 - protein, 166 aa, Homo sapiens
  IFNB_E29N
MSYNLLGFLQRSSNFQCQKLLWQLNGRLNYCLKDRMNFDIPEEIKQLQQFQKEDAALTIYEMLQNIFAIFRQDSSSTGWNETIVENLLANVYHQINHLKTVLEEKLEKEDFTRGKLMSSLHLKRYYGRILHYLKAKEYSHCAWTIVRVEILRNFYFINRLTGYLRN

SEQ ID NO: 200 - protein, 166 aa, Homo sapiens
  IFNB_E29Q
MSYNLLGFLQRSSNFQCQKLLWQLNGRLQYCLKDRMNFDIPEEIKQLQQFQKEDAALTIYEMLQNIFAIFRQDSSSTGWNETIVENLLANVYHQINHLKTVLEEKLEKEDFTRGKLMSSLHLKRYYGRILHYLKAKEYSHCAWTIVRVEILRNFYFINRLTGYLRN

SEQ ID NO: 201 - protein, 166 aa, Homo sapiens
  IFNB_E29H
MSYNLLGFLQRSSNFQCQKLLWQLNGRLHYCLKDRMNFDIPEEIKQLQQFQKEDAALTIYEMLQNIFAIFRQDSSSTGWNETIVENLLANVYHQINHLKTVLEEKLEKEDFTRGKLMSSLHLKRYYGRILHYLKAKEYSHCAWTIVRVEILRNFYFINRLTGYLRN

SEQ ID NO: 202 - protein, 166 aa, Homo sapiens
  IFNB_Y30H
MSYNLLGFLQRSSNFQCQKLLWQLNGRLEHCLKDRMNFDIPEEIKQLQQFQKEDAALTIYEMLQNIFAIFRQDSSSTGWNETIVENLLANVYHQINHLKTVLEEKLEKEDFTRGKLMSSLHLKRYYGRILHYLKAKEYSHCAWTIVRVEILRNFYFINRLTGYLRN

SEQ ID NO: 203 - protein, 166 aa, Homo sapiens
  IFNB_Y30I
MSYNLLGFLQRSSNFQCQKLLWQLNGRLEICLKDRMNFDIPEEIKQLQQFQKEDAALTIYEMLQNIFAIFRQDSSSTGWNETIVENLLANVYHQINHLKTVLEEKLEKEDFTRGKLMSSLHLKRYYGRILHYLKAKEYSHCAWTIVRVEILRNFYFINRLTGYLRN

SEQ ID NO: 204 - protein, 166 aa, Homo sapiens
  IFNB_L32I
MSYNLLGFLQRSSNFQCQKLLWQLNGRLEYCIKDRMNFDIPEEIKQLQQFQKEDAALTIYEMLQNIFAIFRQDSSSTGWNETIVENLLANVYHQINHLKTVLEEKLEKEDFTRGKLMSSLHLKRYYGRILHYLKAKEYSHCAWTIVRVEILRNFYFINRLTGYLRN

SEQ ID NO: 205 - protein, 166 aa, Homo sapiens
  IFNB_L32V
MSYNLLGFLQRSSNFQCQKLLWQLNGRLEYCVKDRMNFDIPEEIKQLQQFQKEDAALTIYEMLQNIFAIFRQDSSSTGWNETIVENLLANVYHQINHLKTVLEEKLEKEDFTRGKLMSSLHLKRYYGRILHYLKAKEYSHCAWTIVRVEILRNFYFINRLTGYLRN

SEQ ID NO: 206 - protein, 166 aa, Homo sapiens
  IFNB_L32T
MSYNLLGFLQRSSNFQCQKLLWQLNGRLEYCTKDRMNFDIPEEIKQLQQFQKEDAALTIYEMLQNIFAIFRQDSSSTGWNETIVENLLANVYHQINHLKTVLEEKLEKEDFTRGKLMSSLHLKRYYGRILHYLKAKEYSHCAWTIVRVEILRNFYFINRLTGYLRN

SEQ ID NO: 207 - protein, 166 aa, Homo sapiens
  IFNB_L32Q
MSYNLLGFLQRSSNFQCQKLLWQLNGRLEYCQKDRMNFDIPEEIKQLQQFQKEDAALTIYEMLQNIFAIFRQDSSSTGWNETIVENLLANVYHQINHLKTVLEEKLEKEDFTRGKLMSSLHLKRYYGRILHYLKAKEYSHCAWTIVRVEILRNFYFINRLTGYLRN

SEQ ID NO: 208 - protein, 166 aa, Homo sapiens
  IFNB_L32H
MSYNLLGFLQRSSNFQCQKLLWQLNGRLEYCHKDRMNFDIPEEIKQLQQFQKEDAALTIYEMLQNIFAIFRQDSSSTGWNETIVENLLANVYHQINHLKTVLEEKLEKEDFTRGKLMSSLHLKRYYGRILHYLKAKEYSHCAWTIVRVEILRNFYFINRLTGYLRN

SEQ ID NO: 209 - protein, 166 aa, Homo sapiens
  IFNB_L32A
MSYNLLGFLQRSSNFQCQKLLWQLNGRLEYCAKDRMNFDIPEEIKQLQQFQKEDAALTIYEMLQNIFAIFRQDSSSTGWNETIVENLLANVYHQINHLKTVLEEKLEKEDFTRGKLMSSLHLKRYYGRILHYLKAKEYSHCAWTIVRVEILRNFYFINRLTGYLRN

SEQ ID NO: 210 - protein, 166 aa, Homo sapiens
  IFNB_K33N
MSYNLLGFLQRSSNFQCQKLLWQLNGRLEYCLNDRMNFDIPEEIKQLQQFQKEDAALTIYEMLQNIFAIFRQDSSSTGWNETIVENLLANVYHQINHLKTVLEEKLEKEDFTRGKLMSSLHLKRYYGRILHYLKAKEYSHCAWTIVRVEILRNFYFINRLTGYLRN

SEQ ID NO: 211 - protein, 166 aa, Homo sapiens
  IFNB_K33Q
MSYNLLGFLQRSSNFQCQKLLWQLNGRLEYCLQDRMNFDIPEEIKQLQQFQKEDAALTIYEMLQNIFAIFRQDSSSTGWNETIVENLLANVYHQINHLKTVLEEKLEKEDFTRGKLMSSLHLKRYYGRILHYLKAKEYSHCAWTIVRVEILRNFYFINRLTGYLRN

SEQ ID NO: 212 - protein, 166 aa, Homo sapiens
  IFNB_K33T
MSYNLLGFLQRSSNFQCQKLLWQLNGRLEYCLTDRMNFDIPEEIKQLQQFQKEDAALTIYEMLQNIFAIFRQDSSSTGWNETIVENLLANVYHQINHLKTVLEEKLEKEDFTRGKLMSSLHLKRYYGRILHYLKAKEYSHCAWTIVRVEILRNFYFINRLTGYLRN

SEQ ID NO: 213 - protein, 166 aa, Homo sapiens
  IFNB_K33S
MSYNLLGFLQRSSNFQCQKLLWQLNGRLEYCLSDRMNFDIPEEIKQLQQFQKEDAALTIYEMLQNIFAIFRQDSSSTGWNETIVENLLANVYHQINHLKTVLEEKLEKEDFTRGKLMSSLHLKRYYGRILHYLKAKEYSHCAWTIVRVEILRNFYFINRLTGYLRN

SEQ ID NO: 214 - protein, 166 aa, Homo sapiens
  IFNB_K33H
MSYNLLGFLQRSSNFQCQKLLWQLNGRLEYCLHDRMNFDIPEEIKQLQQFQKEDAALTIYEMLQNIFAIFRQDSSSTGWNETIVENLLANVYHQINHLKTVLEEKLEKEDFTRGKLMSSLHLKRYYGRILHYLKAKEYSHCAWTIVRVEILRNFYFINRLTGYLRN

SEQ ID NO: 215 - protein, 166 aa, Homo sapiens
  IFNB_D34N
MSYNLLGFLQRSSNFQCQKLLWQLNGRLEYCLKNRMNFDIPEEIKQLQQFQKEDAALTIYEMLQNIFAIFRQDSSSTGWNETIVENLLANVYHQINHLKTVLEEKLEKEDFTRGKLMSSLHLKRYYGRILHYLKAKEYSHCAWTIVRVEILRNFYFINRLTGYLRN

SEQ ID NO: 216 - protein, 166 aa, Homo sapiens
  IFNB_D34Q
MSYNLLGFLQRSSNFQCQKLLWQLNGRLEYCLKQRMNFDIPEEIKQLQQFQKEDAALTIYEMLQNIFAIFRQDSSSTGWNETIVENLLANVYHQINHLKTVLEEKLEKEDFTRGKLMSSLHLKRYYGRILHYLKAKEYSHCAWTIVRVEILRNFYFINRLTGYLRN

SEQ ID NO: 217 - protein, 166 aa, Homo sapiens
  IFNB_R35H
MSYNLLGFLQRSSNFQCQKLLWQLNGRLEYCLKDHMNFDIPEEIKQLQQFQKEDAALTIYEMLQNIFAIFRQDSSSTGWNETIVENLLANVYHQINHLKTVLEEKLEKEDFTRGKLMSSLHLKRYYGRILHYLKAKEYSHCAWTIVRVEILRNFYFINRLTGYLRN

SEQ ID NO: 218 - protein, 166 aa, Homo sapiens
  IFNB_R35Q
MSYNLLGFLQRSSNFQCQKLLWQLNGRLEYCLKDQMNFDIPEEIKQLQQFQKEDAALTIYEMLQNIFAIFRQDSSSTGWNETIVENLLANVYHQINHLKTVLEEKLEKEDFTRGKLMSSLHLKRYYGRILHYLKAKEYSHCAWTIVRVEILRNFYFINRLTGYLRN

SEQ ID NO: 219 - protein, 166 aa, Homo sapiens
  IFNB_M36I
MSYNLLGFLQRSSNFQCQKLLWQLNGRLEYCLKDRINFDIPEEIKQLQQFQKEDAALTIYEMLQNIFAIFRQDSSSTGWNETIVENLLANVYHQINHLKTVLEEKLEKEDFTRGKLMSSLHLKRYYGRILHYLKAKEYSHCAWTIVRVEILRNFYFINRLTGYLRN

SEQ ID NO: 220 - protein, 166 aa, Homo sapiens
  IFNB_M36V
MSYNLLGFLQRSSNFQCQKLLWQLNGRLEYCLKDRVNFDIPEEIKQLQQFQKEDAALTIYEMLQNIFAIFRQDSSSTGWNETIVENLLANVYHQINHLKTVLEEKLEKEDFTRGKLMSSLHLKRYYGRILHYLKAKEYSHCAWTIVRVEILRNFYFINRLTGYLRN

SEQ ID NO: 221 - protein, 166 aa, Homo sapiens
  IFNB_M36T
MSYNLLGFLQRSSNFQCQKLLWQLNGRLEYCLKDRTNFDIPEEIKQLQQFQKEDAALTIYEMLQNIFAIFRQDSSSTGWNETIVENLLANVYHQINHLKTVLEEKLEKEDFTRGKLMSSLHLKRYYGRILHYLKAKEYSHCAWTIVRVEILRNFYFINRLTGYLRN

SEQ ID NO: 222 - protein, 166 aa, Homo sapiens
  IFNB_M36Q
MSYNLLGFLQRSSNFQCQKLLWQLNGRLEYCLKDRQNFDIPEEIKQLQQFQKEDAALTIYEMLQNIFAIFRQDSSSTGWNETIVENLLANVYHQINHLKTVLEEKLEKEDFTRGKLMSSLHLKRYYGRILHYLKAKEYSHCAWTIVRVEILRNFYFINRLTGYLRN

SEQ ID NO: 223 - protein, 166 aa, Homo sapiens
  IFNB_M36A
MSYNLLGFLQRSSNFQCQKLLWQLNGRLEYCLKDRANFDIPEEIKQLQQFQKEDAALTIYEMLQNIFAIFRQDSSSTGWNETIVENLLANVYHQINHLKTVLEEKLEKEDFTRGKLMSSLHLKRYYGRILHYLKAKEYSHCAWTIVRVEILRNFYFINRLTGYLRN

SEQ ID NO: 224 - protein, 166 aa, Homo sapiens
  IFNB_F38I
MSYNLLGFLQRSSNFQCQKLLWQLNGRLEYCLKDRMNIDIPEEIKQLQQFQKEDAALTIYEMLQNIFAIFRQDSSSTGWNETIVENLLANVYHQINHLKTVLEEKLEKEDFTRGKLMSSLHLKRYYGRILHYLKAKEYSHCAWTIVRVEILRNFYFINRLTGYLRN

SEQ ID NO: 225 - protein, 166 aa, Homo sapiens
  IFNB_F38V
MSYNLLGFLQRSSNFQCQKLLWQLNGRLEYCLKDRMNVDIPEEIKQLQQFQKEDAALTIYEMLQNIFAIFRQDSSSTGWNETIVENLLANVYHQINHLKTVLEEKLEKEDFTRGKLMSSLHLKRYYGRILHYLKAKEYSHCAWTIVRVEILRNFYFINRLTGYLRN

SEQ ID NO: 226 - protein, 166 aa, Homo sapiens
  IFNB_D39N
MSYNLLGFLQRSSNFQCQKLLWQLNGRLEYCLKDRMNFNIPEEIKQLQQFQKEDAALTIYEMLQNIFAIFRQDSSSTGWNETIVENLLANVYHQINHLKTVLEEKLEKEDFTRGKLMSSLHLKRYYGRILHYLKAKEYSHCAWTIVRVEILRNFYFINRLTGYLRN

SEQ ID NO: 227 - protein, 166 aa, Homo sapiens
  IFNB_D39Q
MSYNLLGFLQRSSNFQCQKLLWQLNGRLEYCLKDRMNFQIPEEIKQLQQFQKEDAALTIYEMLQNIFAIFRQDSSSTGWNETIVENLLANVYHQINHLKTVLEEKLEKEDFTRGKLMSSLHLKRYYGRILHYLKAKEYSHCAWTIVRVEILRNFYFINRLTGYLRN

SEQ ID NO: 228 - protein, 166 aa, Homo sapiens
  IFNB_D39H
MSYNLLGFLQRSSNFQCQKLLWQLNGRLEYCLKDRMNFHIPEEIKQLQQFQKEDAALTIYEMLQNIFAIFRQDSSSTGWNETIVENLLANVYHQINHLKTVLEEKLEKEDFTRGKLMSSLHLKRYYGRILHYLKAKEYSHCAWTIVRVEILRNFYFINRLTGYLRN

SEQ ID NO: 229 - protein, 166 aa, Homo sapiens
  IFNB_D39G
MSYNLLGFLQRSSNFQCQKLLWQLNGRLEYCLKDRMNFGIPEEIKQLQQFQKEDAALTIYEMLQNIFAIFRQDSSSTGWNETIVENLLANVYHQINHLKTVLEEKLEKEDFTRGKLMSSLHLKRYYGRILHYLKAKEYSHCAWTIVRVEILRNFYFINRLTGYLRN

SEQ ID NO: 230 - protein, 166 aa, Homo sapiens
  IFNB_P41A
MSYNLLGFLQRSSNFQCQKLLWQLNGRLEYCLKDRMNFDIAEEIKQLQQFQKEDAALTIYEMLQNIFAIFRQDSSSTGWNETIVENLLANVYHQINHLKTVLEEKLEKEDFTRGKLMSSLHLKRYYGRILHYLKAKEYSHCAWTIVRVEILRNFYFINRLTGYLRN

SEQ ID NO: 231 - protein, 166 aa, Homo sapiens
  IFNB_P41S
MSYNLLGFLQRSSNFQCQKLLWQLNGRLEYCLKDRMNFDISEEIKQLQQFQKEDAALTIYEMLQNIFAIFRQDSSSTGWNETIVENLLANVYHQINHLKTVLEEKLEKEDFTRGKLMSSLHLKRYYGRILHYLKAKEYSHCAWTIVRVEILRNFYFINRLTGYLRN

SEQ ID NO: 232 - protein, 166 aa, Homo sapiens
  IFNB_E42N
MSYNLLGFLQRSSNFQCQKLLWQLNGRLEYCLKDRMNFDIPNEIKQLQQFQKEDAALTIYEMLQNIFAIFRQDSSSTGWNETIVENLLANVYHQINHLKTVLEEKLEKEDFTRGKLMSSLHLKRYYGRILHYLKAKEYSHCAWTIVRVEILRNFYFINRLTGYLRN

SEQ ID NO: 233 - protein, 166 aa, Homo sapiens
  IFNB_E42Q
MSYNLLGFLQRSSNFQCQKLLWQLNGRLEYCLKDRMNFDIPQEIKQLQQFQKEDAALTIYEMLQNIFAIFRQDSSSTGWNETIVENLLANVYHQINHLKTVLEEKLEKEDFTRGKLMSSLHLKRYYGRILHYLKAKEYSHCAWTIVRVEILRNFYFINRLTGYLRN

SEQ ID NO: 234 - protein, 166 aa, Homo sapiens
  IFNB_E42H
MSYNLLGFLQRSSNFQCQKLLWQLNGRLEYCLKDRMNFDIPHEIKQLQQFQKEDAALTIYEMLQNIFAIFRQDSSSTGWNETIVENLLANVYHQINHLKTVLEEKLEKEDFTRGKLMSSLHLKRYYGRILHYLKAKEYSHCAWTIVRVEILRNFYFINRLTGYLRN

SEQ ID NO: 235 - protein, 166 aa, Homo sapiens
  IFNB_E43N
MSYNLLGFLQRSSNFQCQKLLWQLNGRLEYCLKDRMNFDIPENIKQLQQFQKEDAALTIYEMLQNIFAIFRQDSSSTGWNETIVENLLANVYHQINHLKTVLEEKLEKEDFTRGKLMSSLHLKRYYGRILHYLKAKEYSHCAWTIVRVEILRNFYFINRLTGYLRN

SEQ ID NO: 236 - protein, 166 aa, Homo sapiens
  IFNB_E43Q
MSYNLLGFLQRSSNFQCQKLLWQLNGRLEYCLKDRMNFDIPEQIKQLQQFQKEDAALTIYEMLQNIFAIFRQDSSSTGWNETIVENLLANVYHQINHLKTVLEEKLEKEDFTRGKLMSSLHLKRYYGRILHYLKAKEYSHCAWTIVRVEILRNFYFINRLTGYLRN

SEQ ID NO: 237 - protein, 166 aa, Homo sapiens
  IFNB_E43H
MSYNLLGFLQRSSNFQCQKLLWQLNGRLEYCLKDRMNFDIPEHIKQLQQFQKEDAALTIYEMLQNIFAIFRQDSSSTGWNETIVENLLANVYHQINHLKTVLEEKLEKEDFTRGKLMSSLHLKRYYGRILHYLKAKEYSHCAWTIVRVEILRNFYFINRLTGYLRN

SEQ ID NO: 238 - protein, 166 aa, Homo sapiens
  IFNB_K45N
MSYNLLGFLQRSSNFQCQKLLWQLNGRLEYCLKDRMNFDIPEEINQLQQFQKEDAALTIYEMLQNIFAIFRQDSSSTGWNETIVENLLANVYHQINHLKTVLEEKLEKEDFTRGKLMSSLHLKRYYGRILHYLKAKEYSHCAWTIVRVEILRNFYFINRLTGYLRN

SEQ ID NO: 239 - protein, 166 aa, Homo sapiens
  IFNB_K45Q
MSYNLLGFLQRSSNFQCQKLLWQLNGRLEYCLKDRMNFDIPEEIQQLQQFQKEDAALTIYEMLQNIFAIFRQDSSSTGWNETIVENLLANVYHQINHLKTVLEEKLEKEDFTRGKLMSSLHLKRYYGRILHYLKAKEYSHCAWTIVRVEILRNFYFINRLTGYLRN

SEQ ID NO: 240 - protein, 166 aa, Homo sapiens
  IFNB_K45T
MSYNLLGFLQRSSNFQCQKLLWQLNGRLEYCLKDRMNFDIPEEITQLQQFQKEDAALTIYEMLQNIFAIFRQDSSSTGWNETIVENLLANVYHQINHLKTVLEEKLEKEDFTRGKLMSSLHLKRYYGRILHYLKAKEYSHCAWTIVRVEILRNFYFINRLTGYLRN

SEQ ID NO: 241 - protein, 166 aa, Homo sapiens
  IFNB_K45S
MSYNLLGFLQRSSNFQCQKLLWQLNGRLEYCLKDRMNFDIPEEISQLQQFQKEDAALTIYEMLQNIFAIFRQDSSSTGWNETIVENLLANVYHQINHLKTVLEEKLEKEDFTRGKLMSSLHLKRYYGRILHYLKAKEYSHCAWTIVRVEILRNFYFINRLTGYLRN

SEQ ID NO: 242 - protein, 166 aa, Homo sapiens
  IFNB_K45H
MSYNLLGFLQRSSNFQCQKLLWQLNGRLEYCLKDRMNFDIPEEIHQLQQFQKEDAALTIYEMLQNIFAIFRQDSSSTGWNETIVENLLANVYHQINHLKTVLEEKLEKEDFTRGKLMSSLHLKRYYGRILHYLKAKEYSHCAWTIVRVEILRNFYFINRLTGYLRN

SEQ ID NO: 243 - protein, 166 aa, Homo sapiens
  IFNB_L47I
MSYNLLGFLQRSSNFQCQKLLWQLNGRLEYCLKDRMNFDIPEEIKQIQQFQKEDAALTIYEMLQNIFAIFRQDSSSTGWNETIVENLLANVYHQINHLKTVLEEKLEKEDFTRGKLMSSLHLKRYYGRILHYLKAKEYSHCAWTIVRVEILRNFYFINRLTGYLRN

SEQ ID NO: 244 - protein, 166 aa, Homo sapiens
  IFNB_L47V
MSYNLLGFLQRSSNFQCQKLLWQLNGRLEYCLKDRMNFDIPEEIKQVQQFQKEDAALTIYEMLQNIFAIFRQDSSSTGWNETIVENLLANVYHQINHLKTVLEEKLEKEDFTRGKLMSSLHLKRYYGRILHYLKAKEYSHCAWTIVRVEILRNFYFINRLTGYLRN

SEQ ID NO: 245 - protein, 166 aa, Homo sapiens
  IFNB_L47T
MSYNLLGFLQRSSNFQCQKLLWQLNGRLEYCLKDRMNFDIPEEIKQTQQFQKEDAALTIYEMLQNIFAIFRQDSSSTGWNETIVENLLANVYHQINHLKTVLEEKLEKEDFTRGKLMSSLHLKRYYGRILHYLKAKEYSHCAWTIVRVEILRNFYFINRLTGYLRN

SEQ ID NO: 246 - protein, 166 aa, Homo sapiens
  IFNB_L47Q
MSYNLLGFLQRSSNFQCQKLLWQLNGRLEYCLKDRMNFDIPEEIKQQQQFQKEDAALTIYEMLQNIFAIFRQDSSSTGWNETIVENLLANVYHQINHLKTVLEEKLEKEDFTRGKLMSSLHLKRYYGRILHYLKAKEYSHCAWTIVRVEILRNFYFINRLTGYLRN

SEQ ID NO: 247 - protein, 166 aa, Homo sapiens
  IFNB_L47H
MSYNLLGFLQRSSNFQCQKLLWQLNGRLEYCLKDRMNFDIPEEIKQHQQFQKEDAALTIYEMLQNIFAIFRQDSSSTGWNETIVENLLANVYHQINHLKTVLEEKLEKEDFTRGKLMSSLHLKRYYGRILHYLKAKEYSHCAWTIVRVEILRNFYFINRLTGYLRN

SEQ ID NO: 248 - protein, 166 aa, Homo sapiens
  IFNB_L47A
MSYNLLGFLQRSSNFQCQKLLWQLNGRLEYCLKDRMNFDIPEEIKQAQQFQKEDAALTIYEMLQNIFAIFRQDSSSTGWNETIVENLLANVYHQINHLKTVLEEKLEKEDFTRGKLMSSLHLKRYYGRILHYLKAKEYSHCAWTIVRVEILRNFYFINRLTGYLRN

SEQ ID NO: 249 - protein, 166 aa, Homo sapiens
  IFNB_F50I
MSYNLLGFLQRSSNFQCQKLLWQLNGRLEYCLKDRMNFDIPEEIKQLQQIQKEDAALTIYEMLQNIFAIFRQDSSSTGWNETIVENLLANVYHQINHLKTVLEEKLEKEDFTRGKLMSSLHLKRYYGRILHYLKAKEYSHCAWTIVRVEILRNFYFINRLTGYLRN

SEQ ID NO: 250 - protein, 166 aa, Homo sapiens
  IFNB_F50V
MSYNLLGFLQRSSNFQCQKLLWQLNGRLEYCLKDRMNFDIPEEIKQLQQVQKEDAALTIYEMLQNIFAIFRQDSSSTGWNETIVENLLANVYHQINHLKTVLEEKLEKEDFTRGKLMSSLHLKRYYGRILHYLKAKEYSHCAWTIVRVEILRNFYFINRLTGYLRN

SEQ ID NO: 251 - protein, 166 aa, Homo sapiens
  IFNB_K52N
MSYNLLGFLQRSSNFQCQKLLWQLNGRLEYCLKDRMNFDIPEEIKQLQQFQNEDAALTIYEMLQNIFAIFRQDSSSTGWNETIVENLLANVYHQINHLKTVLEEKLEKEDFTRGKLMSSLHLKRYYGRILHYLKAKEYSHCAWTIVRVEILRNFYFINRLTGYLRN

SEQ ID NO: 252 - protein, 166 aa, Homo sapiens
  IFNB_K52Q
MSYNLLGFLQRSSNFQCQKLLWQLNGRLEYCLKDRMNFDIPEEIKQLQQFQQEDAALTIYEMLQNIFAIFRQDSSSTGWNETIVENLLANVYHQINHLKTVLEEKLEKEDFTRGKLMSSLHLKRYYGRILHYLKAKEYSHCAWTIVRVEILRNFYFINRLTGYLRN

SEQ ID NO: 253 - protein, 166 aa, Homo sapiens
  IFNB_K52T
MSYNLLGFLQRSSNFQCQKLLWQLNGRLEYCLKDRMNFDIPEEIKQLQQFQTEDAALTIYEMLQNIFAIFRQDSSSTGWNETIVENLLANVYHQINHLKTVLEEKLEKEDFTRGKLMSSLHLKRYYGRILHYLKAKEYSHCAWTIVRVEILRNFYFINRLTGYLRN

SEQ ID NO: 254 - protein, 166 aa, Homo sapiens
  IFNB_K52S
MSYNLLGFLQRSSNFQCQKLLWQLNGRLEYCLKDRMNFDIPEEIKQLQQFQSEDAALTIYEMLQNIFAIFRQDSSSTGWNETIVENLLANVYHQINHLKTVLEEKLEKEDFTRGKLMSSLHLKRYYGRILHYLKAKEYSHCAWTIVRVEILRNFYFINRLTGYLRN

SEQ ID NO: 255 - protein, 166 aa, Homo sapiens
  IFNB_K52H
MSYNLLGFLQRSSNFQCQKLLWQLNGRLEYCLKDRMNFDIPEEIKQLQQFQHEDAALTIYEMLQNIFAIFRQDSSSTGWNETIVENLLANVYHQINHLKTVLEEKLEKEDFTRGKLMSSLHLKRYYGRILHYLKAKEYSHCAWTIVRVEILRNFYFINRLTGYLRN

SEQ ID NO: 256 - protein, 166 aa, Homo sapiens
  IFNB_E53N
MSYNLLGFLQRSSNFQCQKLLWQLNGRLEYCLKDRMNFDIPEEIKQLQQFQKNDAALTIYEMLQNIFAIFRQDSSSTGWNETIVENLLANVYHQINHLKTVLEEKLEKEDFTRGKLMSSLHLKRYYGRILHYLKAKEYSHCAWTIVRVEILRNFYFINRLTGYLRN

SEQ ID NO: 257 - protein, 166 aa, Homo sapiens
  IFNB_E53Q
MSYNLLGFLQRSSNFQCQKLLWQLNGRLEYCLKDRMNFDIPEEIKQLQQFQKQDAALTIYEMLQNIFAIFRQDSSSTGWNETIVENLLANVYHQINHLKTVLEEKLEKEDFTRGKLMSSLHLKRYYGRILHYLKAKEYSHCAWTIVRVEILRNFYFINRLTGYLRN

SEQ ID NO: 258 - protein, 166 aa, Homo sapiens
  IFNB_E53H
MSYNLLGFLQRSSNFQCQKLLWQLNGRLEYCLKDRMNFDIPEEIKQLQQFQKHDAALTIYEMLQNIFAIFRQDSSSTGWNETIVENLLANVYHQINHLKTVLEEKLEKEDFTRGKLMSSLHLKRYYGRILHYLKAKEYSHCAWTIVRVEILRNFYFINRLTGYLRN

SEQ ID NO: 259 - protein, 166 aa, Homo sapiens
  IFNB_D54N
MSYNLLGFLQRSSNFQCQKLLWQLNGRLEYCLKDRMNFDIPEEIKQLQQFQKENAALTIYEMLQNIFAIFRQDSSSTGWNETIVENLLANVYHQINHLKTVLEEKLEKEDFTRGKLMSSLHLKRYYGRILHYLKAKEYSHCAWTIVRVEILRNFYFINRLTGYLRN

SEQ ID NO: 260 - protein, 166 aa, Homo sapiens
  IFNB_D54Q
MSYNLLGFLQRSSNFQCQKLLWQLNGRLEYCLKDRMNFDIPEEIKQLQQFQKEQAALTIYEMLQNIFAIFRQDSSSTGWNETIVENLLANVYHQINHLKTVLEEKLEKEDFTRGKLMSSLHLKRYYGRILHYLKAKEYSHCAWTIVRVEILRNFYFINRLTGYLRN

SEQ ID NO: 261 - protein, 166 aa, Homo sapiens
  IFNB_L57I
MSYNLLGFLQRSSNFQCQKLLWQLNGRLEYCLKDRMNFDIPEEIKQLQQFQKEDAAITIYEMLQNIFAIFRQDSSSTGWNETIVENLLANVYHQINHLKTVLEEKLEKEDFTRGKLMSSLHLKRYYGRILHYLKAKEYSHCAWTIVRVEILRNFYFINRLTGYLRN

SEQ ID NO: 262 - protein, 166 aa, Homo sapiens
  IFNB_L57V
MSYNLLGFLQRSSNFQCQKLLWQLNGRLEYCLKDRMNFDIPEEIKQLQQFQKEDAAVTIYEMLQNIFAIFRQDSSSTGWNETIVENLLANVYHQINHLKTVLEEKLEKEDFTRGKLMSSLHLKRYYGRILHYLKAKEYSHCAWTIVRVEILRNFYFINRLTGYLRN

SEQ ID NO: 263 - protein, 166 aa, Homo sapiens
  IFNB_Y60H
MSYNLLGFLQRSSNFQCQKLLWQLNGRLEYCLKDRMNFDIPEEIKQLQQFQKEDAALTIHEMLQNIFAIFRQDSSSTGWNETIVENLLANVYHQINHLKTVLEEKLEKEDFTRGKLMSSLHLKRYYGRILHYLKAKEYSHCAWTIVRVEILRNFYFINRLTGYLRN

SEQ ID NO: 264 - protein, 166 aa, Homo sapiens
  IFNB_Y60I
MSYNLLGFLQRSSNFQCQKLLWQLNGRLEYCLKDRMNFDIPEEIKQLQQFQKEDAALTIIEMLQNIFAIFRQDSSSTGWNETIVENLLANVYHQINHLKTVLEEKLEKEDFTRGKLMSSLHLKRYYGRILHYLKAKEYSHCAWTIVRVEILRNFYFINRLTGYLRN

SEQ ID NO: 265 - protein, 166 aa, Homo sapiens
  IFNB_E61N
MSYNLLGFLQRSSNFQCQKLLWQLNGRLEYCLKDRMNFDIPEEIKQLQQFQKEDAALTIYNMLQNIFAIFRQDSSSTGWNETIVENLLANVYHQINHLKTVLEEKLEKEDFTRGKLMSSLHLKRYYGRILHYLKAKEYSHCAWTIVRVEILRNFYFINRLTGYLRN

SEQ ID NO: 266 - protein, 166 aa, Homo sapiens
  IFNB_E61Q
MSYNLLGFLQRSSNFQCQKLLWQLNGRLEYCLKDRMNFDIPEEIKQLQQFQKEDAALTIYQMLQNIFAIFRQDSSSTGWNETIVENLLANVYHQINHLKTVLEEKLEKEDFTRGKLMSSLHLKRYYGRILHYLKAKEYSHCAWTIVRVEILRNFYFINRLTGYLRN

SEQ ID NO: 267 - protein, 166 aa, Homo sapiens
  IFNB_E61H
MSYNLLGFLQRSSNFQCQKLLWQLNGRLEYCLKDRMNFDIPEEIKQLQQFQKEDAALTIYHMLQNIFAIFRQDSSSTGWNETIVENLLANVYHQINHLKTVLEEKLEKEDFTRGKLMSSLHLKRYYGRILHYLKAKEYSHCAWTIVRVEILRNFYFINRLTGYLRN

SEQ ID NO: 268 - protein, 166 aa, Homo sapiens
  IFNB_M62I
MSYNLLGFLQRSSNFQCQKLLWQLNGRLEYCLKDRMNFDIPEEIKQLQQFQKEDAALTIYEILQNIFAIFRQDSSSTGWNETIVENLLANVYHQINHLKTVLEEKLEKEDFTRGKLMSSLHLKRYYGRILHYLKAKEYSHCAWTIVRVEILRNFYFINRLTGYLRN

SEQ ID NO: 269 - protein, 166 aa, Homo sapiens
  IFNB_M62V
MSYNLLGFLQRSSNFQCQKLLWQLNGRLEYCLKDRMNFDIPEEIKQLQQFQKEDAALTIYEVLQNIFAIFRQDSSSTGWNETIVENLLANVYHQINHLKTVLEEKLEKEDFTRGKLMSSLHLKRYYGRILHYLKAKEYSHCAWTIVRVEILRNFYFINRLTGYLRN

SEQ ID NO: 270 - protein, 166 aa, Homo sapiens
  IFNB_L63I
MSYNLLGFLQRSSNFQCQKLLWQLNGRLEYCLKDRMNFDIPEEIKQLQQFQKEDAALTIYEMIQNIFAIFRQDSSSTGWNETIVENLLANVYHQINHLKTVLEEKLEKEDFTRGKLMSSLHLKRYYGRILHYLKAKEYSHCAWTIVRVEILRNFYFINRLTGYLRN

SEQ ID NO: 271 - protein, 166 aa, Homo sapiens
  IFNB_L63V
MSYNLLGFLQRSSNFQCQKLLWQLNGRLEYCLKDRMNFDIPEEIKQLQQFQKEDAALTIYEMVQNIFAIFRQDSSSTGWNETIVENLLANVYHQINHLKTVLEEKLEKEDFTRGKLMSSLHLKRYYGRILHYLKAKEYSHCAWTIVRVEILRNFYFINRLTGYLRN

SEQ ID NO: 272 - protein, 166 aa, Homo sapiens
  IFNB_F67I
MSYNLLGFLQRSSNFQCQKLLWQLNGRLEYCLKDRMNFDIPEEIKQLQQFQKEDAALTIYEMLQNIIAIFRQDSSSTGWNETIVENLLANVYHQINHLKTVLEEKLEKEDFTRGKLMSSLHLKRYYGRILHYLKAKEYSHCAWTIVRVEILRNFYFINRLTGYLRN

SEQ ID NO: 273 - protein, 166 aa, Homo sapiens
  IFNB_F67V
MSYNLLGFLQRSSNFQCQKLLWQLNGRLEYCLKDRMNFDIPEEIKQLQQFQKEDAALTIYEMLQNIVAIFRQDSSSTGWNETIVENLLANVYHQINHLKTVLEEKLEKEDFTRGKLMSSLHLKRYYGRILHYLKAKEYSHCAWTIVRVEILRNFYFINRLTGYLRN

SEQ ID NO: 274 - protein, 166 aa, Homo sapiens
  IFNB_F70I
MSYNLLGFLQRSSNFQCQKLLWQLNGRLEYCLKDRMNFDIPEEIKQLQQFQKEDAALTIYEMLQNIFAIIRQDSSSTGWNETIVENLLANVYHQINHLKTVLEEKLEKEDFTRGKLMSSLHLKRYYGRILHYLKAKEYSHCAWTIVRVEILRNFYFINRLTGYLRN

SEQ ID NO: 275 - protein, 166 aa, Homo sapiens
  IFNB_F70V
MSYNLLGFLQRSSNFQCQKLLWQLNGRLEYCLKDRMNFDIPEEIKQLQQFQKEDAALTIYEMLQNIFAIVRQDSSSTGWNETIVENLLANVYHQINHLKTVLEEKLEKEDFTRGKLMSSLHLKRYYGRILHYLKAKEYSHCAWTIVRVEILRNFYFINRLTGYLRN

SEQ ID NO: 276 - protein, 166 aa, Homo sapiens
  IFNB_R71H
MSYNLLGFLQRSSNFQCQKLLWQLNGRLEYCLKDRMNFDIPEEIKQLQQFQKEDAALTIYEMLQNIFAIFHQDSSSTGWNETIVENLLANVYHQINHLKTVLEEKLEKEDFTRGKLMSSLHLKRYYGRILHYLKAKEYSHCAWTIVRVEILRNFYFINRLTGYLRN

SEQ ID NO: 277 - protein, 166 aa, Homo sapiens
  IFNB_R71Q
MSYNLLGFLQRSSNFQCQKLLWQLNGRLEYCLKDRMNFDIPEEIKQLQQFQKEDAALTIYEMLQNIFAIFQQDSSSTGWNETIVENLLANVYHQINHLKTVLEEKLEKEDFTRGKLMSSLHLKRYYGRILHYLKAKEYSHCAWTIVRVEILRNFYFINRLTGYLRN

SEQ ID NO: 278 - protein, 166 aa, Homo sapiens
  IFNB_D73N
MSYNLLGFLQRSSNFQCQKLLWQLNGRLEYCLKDRMNFDIPEEIKQLQQFQKEDAALTIYEMLQNIFAIFRQNSSSTGWNETIVENLLANVYHQINHLKTVLEEKLEKEDFTRGKLMSSLHLKRYYGRILHYLKAKEYSHCAWTIVRVEILRNFYFINRLTGYLRN

SEQ ID NO: 279 - protein, 166 aa, Homo sapiens
  IFNB_D73Q
MSYNLLGFLQRSSNFQCQKLLWQLNGRLEYCLKDRMNFDIPEEIKQLQQFQKEDAALTIYEMLQNIFAIFRQQSSSTGWNETIVENLLANVYHQINHLKTVLEEKLEKEDFTRGKLMSSLHLKRYYGRILHYLKAKEYSHCAWTIVRVEILRNFYFINRLTGYLRN

SEQ ID NO: 280 - protein, 166 aa, Homo sapiens
  IFNB_D73H
MSYNLLGFLQRSSNFQCQKLLWQLNGRLEYCLKDRMNFDIPEEIKQLQQFQKEDAALTIYEMLQNIFAIFRQHSSSTGWNETIVENLLANVYHQINHLKTVLEEKLEKEDFTRGKLMSSLHLKRYYGRILHYLKAKEYSHCAWTIVRVEILRNFYFINRLTGYLRN

SEQ ID NO: 281 - protein, 166 aa, Homo sapiens
  IFNB_D73G
MSYNLLGFLQRSSNFQCQKLLWQLNGRLEYCLKDRMNFDIPEEIKQLQQFQKEDAALTIYEMLQNIFAIFRQGSSSTGWNETIVENLLANVYHQINHLKTVLEEKLEKEDFTRGKLMSSLHLKRYYGRILHYLKAKEYSHCAWTIVRVEILRNFYFINRLTGYLRN

SEQ ID NO: 282 - protein, 166 aa, Homo sapiens
  IFNB_W79S
MSYNLLGFLQRSSNFQCQKLLWQLNGRLEYCLKDRMNFDIPEEIKQLQQFQKEDAALTIYEMLQNIFAIFRQDSSSTGSNETIVENLLANVYHQINHLKTVLEEKLEKEDFTRGKLMSSLHLKRYYGRILHYLKAKEYSHCAWTIVRVEILRNFYFINRLTGYLRN

SEQ ID NO: 283 - protein, 166 aa, Homo sapiens
  IFNB_W79H
MSYNLLGFLQRSSNFQCQKLLWQLNGRLEYCLKDRMNFDIPEEIKQLQQFQKEDAALTIYEMLQNIFAIFRQDSSSTGHNETIVENLLANVYHQINHLKTVLEEKLEKEDFTRGKLMSSLHLKRYYGRILHYLKAKEYSHCAWTIVRVEILRNFYFINRLTGYLRN

SEQ ID NO: 284 - protein, 166 aa, Homo sapiens
  IFNB_E81N
MSYNLLGFLQRSSNFQCQKLLWQLNGRLEYCLKDRMNFDIPEEIKQLQQFQKEDAALTIYEMLQNIFAIFRQDSSSTGWNNTIVENLLANVYHQINHLKTVLEEKLEKEDFTRGKLMSSLHLKRYYGRILHYLKAKEYSHCAWTIVRVEILRNFYFINRLTGYLRN

SEQ ID NO: 285 - protein, 166 aa, Homo sapiens
  IFNB_E81Q
MSYNLLGFLQRSSNFQCQKLLWQLNGRLEYCLKDRMNFDIPEEIKQLQQFQKEDAALTIYEMLQNIFAIFRQDSSSTGWNQTIVENLLANVYHQINHLKTVLEEKLEKEDFTRGKLMSSLHLKRYYGRILHYLKAKEYSHCAWTIVRVEILRNFYFINRLTGYLRN

SEQ ID NO: 286 - protein, 166 aa, Homo sapiens
  IFNB_E81H
MSYNLLGFLQRSSNFQCQKLLWQLNGRLEYCLKDRMNFDIPEEIKQLQQFQKEDAALTIYEMLQNIFAIFRQDSSSTGWNHTIVENLLANVYHQINHLKTVLEEKLEKEDFTRGKLMSSLHLKRYYGRILHYLKAKEYSHCAWTIVRVEILRNFYFINRLTGYLRN

SEQ ID NO: 287 - protein, 166 aa, Homo sapiens
  IFNB_E85N
MSYNLLGFLQRSSNFQCQKLLWQLNGRLEYCLKDRMNFDIPEEIKQLQQFQKEDAALTIYEMLQNIFAIFRQDSSSTGWNETIVNNLLANVYHQINHLKTVLEEKLEKEDFTRGKLMSSLHLKRYYGRILHYLKAKEYSHCAWTIVRVEILRNFYFINRLTGYLRN

SEQ ID NO: 288 - protein, 166 aa, Homo sapiens
  IFNB_E85Q
MSYNLLGFLQRSSNFQCQKLLWQLNGRLEYCLKDRMNFDIPEEIKQLQQFQKEDAALTIYEMLQNIFAIFRQDSSSTGWNETIVQNLLANVYHQINHLKTVLEEKLEKEDFTRGKLMSSLHLKRYYGRILHYLKAKEYSHCAWTIVRVEILRNFYFINRLTGYLRN

SEQ ID NO: 289 - protein, 166 aa, Homo sapiens
  IFNB_E85H
MSYNLLGFLQRSSNFQCQKLLWQLNGRLEYCLKDRMNFDIPEEIKQLQQFQKEDAALTIYEMLQNIFAIFRQDSSSTGWNETIVHNLLANVYHQINHLKTVLEEKLEKEDFTRGKLMSSLHLKRYYGRILHYLKAKEYSHCAWTIVRVEILRNFYFINRLTGYLRN

SEQ ID NO: 290 - protein, 166 aa, Homo sapiens
  IFNB_L87I
MSYNLLGFLQRSSNFQCQKLLWQLNGRLEYCLKDRMNFDIPEEIKQLQQFQKEDAALTIYEMLQNIFAIFRQDSSSTGWNETIVENILANVYHQINHLKTVLEEKLEKEDFTRGKLMSSLHLKRYYGRILHYLKAKEYSHCAWTIVRVEILRNFYFINRLTGYLRN

SEQ ID NO: 291 - protein, 166 aa, Homo sapiens
  IFNB_L87V
MSYNLLGFLQRSSNFQCQKLLWQLNGRLEYCLKDRMNFDIPEEIKQLQQFQKEDAALTIYEMLQNIFAIFRQDSSSTGWNETIVENVLANVYHQINHLKTVLEEKLEKEDFTRGKLMSSLHLKRYYGRILHYLKAKEYSHCAWTIVRVEILRNFYFINRLTGYLRN

SEQ ID NO: 292 - protein, 166 aa, Homo sapiens
  IFNB_L88I
MSYNLLGFLQRSSNFQCQKLLWQLNGRLEYCLKDRMNFDIPEEIKQLQQFQKEDAALTIYEMLQNIFAIFRQDSSSTGWNETIVENLIANVYHQINHLKTVLEEKLEKEDFTRGKLMSSLHLKRYYGRILHYLKAKEYSHCAWTIVRVEILRNFYFINRLTGYLRN

SEQ ID NO: 293 - protein, 166 aa, Homo sapiens
  IFNB_L88V
MSYNLLGFLQRSSNFQCQKLLWQLNGRLEYCLKDRMNFDIPEEIKQLQQFQKEDAALTIYEMLQNIFAIFRQDSSSTGWNETIVENLVANVYHQINHLKTVLEEKLEKEDFTRGKLMSSLHLKRYYGRILHYLKAKEYSHCAWTIVRVEILRNFYFINRLTGYLRN

SEQ ID NO: 294 - protein, 166 aa, Homo sapiens
  IFNB_Y92H
MSYNLLGFLQRSSNFQCQKLLWQLNGRLEYCLKDRMNFDIPEEIKQLQQFQKEDAALTIYEMLQNIFAIFRQDSSSTGWNETIVENLLANVHHQINHLKTVLEEKLEKEDFTRGKLMSSLHLKRYYGRILHYLKAKEYSHCAWTIVRVEILRNFYFINRLTGYLRN

SEQ ID NO: 295 - protein, 166 aa, Homo sapiens
  IFNB_Y92I
MSYNLLGFLQRSSNFQCQKLLWQLNGRLEYCLKDRMNFDIPEEIKQLQQFQKEDAALTIYEMLQNIFAIFRQDSSSTGWNETIVENLLANVIHQINHLKTVLEEKLEKEDFTRGKLMSSLHLKRYYGRILHYLKAKEYSHCAWTIVRVEILRNFYFINRLTGYLRN

SEQ ID NO: 296 - protein, 166 aa, Homo sapiens
  IFNB_L98I
MSYNLLGFLQRSSNFQCQKLLWQLNGRLEYCLKDRMNFDIPEEIKQLQQFQKEDAALTIYEMLQNIFAIFRQDSSSTGWNETIVENLLANVYHQINHIKTVLEEKLEKEDFTRGKLMSSLHLKRYYGRILHYLKAKEYSHCAWTIVRVEILRNFYFINRLTGYLRN

SEQ ID NO: 297 - protein, 166 aa, Homo sapiens
  IFNB_L98V
MSYNLLGFLQRSSNFQCQKLLWQLNGRLEYCLKDRMNFDIPEEIKQLQQFQKEDAALTIYEMLQNIFAIFRQDSSSTGWNETIVENLLANVYHQINHVKTVLEEKLEKEDFTRGKLMSSLHLKRYYGRILHYLKAKEYSHCAWTIVRVEILRNFYFINRLTGYLRN

SEQ ID NO: 298 - protein, 166 aa, Homo sapiens
  IFNB_K99N
MSYNLLGFLQRSSNFQCQKLLWQLNGRLEYCLKDRMNFDIPEEIKQLQQFQKEDAALTIYEMLQNIFAIFRQDSSSTGWNETIVENLLANVYHQINHLNTVLEEKLEKEDFTRGKLMSSLHLKRYYGRILHYLKAKEYSHCAWTIVRVEILRNFYFINRLTGYLRN

SEQ ID NO: 299 - protein, 166 aa, Homo sapiens
  IFNB_K99Q
MSYNLLGFLQRSSNFQCQKLLWQLNGRLEYCLKDRMNFDIPEEIKQLQQFQKEDAALTIYEMLQNIFAIFRQDSSSTGWNETIVENLLANVYHQINHLQTVLEEKLEKEDFTRGKLMSSLHLKRYYGRILHYLKAKEYSHCAWTIVRVEILRNFYFINRLTGYLRN

SEQ ID NO: 300 - protein, 166 aa, Homo sapiens
  IFNB_K99T
MSYNLLGFLQRSSNFQCQKLLWQLNGRLEYCLKDRMNFDIPEEIKQLQQFQKEDAALTIYEMLQNIFAIFRQDSSSTGWNETIVENLLANVYHQINHLTTVLEEKLEKEDFTRGKLMSSLHLKRYYGRILHYLKAKEYSHCAWTIVRVEILRNFYFINRLTGYLRN

SEQ ID NO: 301 - protein, 166 aa, Homo sapiens
  IFNB_K99S
MSYNLLGFLQRSSNFQCQKLLWQLNGRLEYCLKDRMNFDIPEEIKQLQQFQKEDAALTIYEMLQNIFAIFRQDSSSTGWNETIVENLLANVYHQINHLSTVLEEKLEKEDFTRGKLMSSLHLKRYYGRILHYLKAKEYSHCAWTIVRVEILRNFYFINRLTGYLRN

SEQ ID NO: 302 - protein, 166 aa, Homo sapiens
  IFNB_K99H
MSYNLLGFLQRSSNFQCQKLLWQLNGRLEYCLKDRMNFDIPEEIKQLQQFQKEDAALTIYEMLQNIFAIFRQDSSSTGWNETIVENLLANVYHQINHLHTVLEEKLEKEDFTRGKLMSSLHLKRYYGRILHYLKAKEYSHCAWTIVRVEILRNFYFINRLTGYLRN

SEQ ID NO: 303 - protein, 166 aa, Homo sapiens
  IFNB_L102I
MSYNLLGFLQRSSNFQCQKLLWQLNGRLEYCLKDRMNFDIPEEIKQLQQFQKEDAALTIYEMLQNIFAIFRQDSSSTGWNETIVENLLANVYHQINHLKTVIEEKLEKEDFTRGKLMSSLHLKRYYGRILHYLKAKEYSHCAWTIVRVEILRNFYFINRLTGYLRN

SEQ ID NO: 304 - protein, 166 aa, Homo sapiens
  IFNB_L102V
MSYNLLGFLQRSSNFQCQKLLWQLNGRLEYCLKDRMNFDIPEEIKQLQQFQKEDAALTIYEMLQNIFAIFRQDSSSTGWNETIVENLLANVYHQINHLKTVVEEKLEKEDFTRGKLMSSLHLKRYYGRILHYLKAKEYSHCAWTIVRVEILRNFYFINRLTGYLRN

SEQ ID NO: 305 - protein, 166 aa, Homo sapiens
  IFNB_E103N
MSYNLLGFLQRSSNFQCQKLLWQLNGRLEYCLKDRMNFDIPEEIKQLQQFQKEDAALTIYEMLQNIFAIFRQDSSSTGWNETIVENLLANVYHQINHLKTVLNEKLEKEDFTRGKLMSSLHLKRYYGRILHYLKAKEYSHCAWTIVRVEILRNFYFINRLTGYLRN

SEQ ID NO: 306 - protein, 166 aa, Homo sapiens
  IFNB_E103Q
MSYNLLGFLQRSSNFQCQKLLWQLNGRLEYCLKDRMNFDIPEEIKQLQQFQKEDAALTIYEMLQNIFAIFRQDSSSTGWNETIVENLLANVYHQINHLKTVLQEKLEKEDFTRGKLMSSLHLKRYYGRILHYLKAKEYSHCAWTIVRVEILRNFYFINRLTGYLRN

SEQ ID NO: 307 - protein, 166 aa, Homo sapiens
  IFNB_E103H
MSYNLLGFLQRSSNFQCQKLLWQLNGRLEYCLKDRMNFDIPEEIKQLQQFQKEDAALTIYEMLQNIFAIFRQDSSSTGWNETIVENLLANVYHQINHLKTVLHEKLEKEDFTRGKLMSSLHLKRYYGRILHYLKAKEYSHCAWTIVRVEILRNFYFINRLTGYLRN

SEQ ID NO: 308 - protein, 166 aa, Homo sapiens
  IFNB_E104N
MSYNLLGFLQRSSNFQCQKLLWQLNGRLEYCLKDRMNFDIPEEIKQLQQFQKEDAALTIYEMLQNIFAIFRQDSSSTGWNETIVENLLANVYHQINHLKTVLENKLEKEDFTRGKLMSSLHLKRYYGRILHYLKAKEYSHCAWTIVRVEILRNFYFINRLTGYLRN

SEQ ID NO: 309 - protein, 166 aa, Homo sapiens
  IFNB_E104Q
MSYNLLGFLQRSSNFQCQKLLWQLNGRLEYCLKDRMNFDIPEEIKQLQQFQKEDAALTIYEMLQNIFAIFRQDSSSTGWNETIVENLLANVYHQINHLKTVLEQKLEKEDFTRGKLMSSLHLKRYYGRILHYLKAKEYSHCAWTIVRVEILRNFYFINRLTGYLRN

SEQ ID NO: 310 - protein, 166 aa, Homo sapiens
  IFNB_E104H
MSYNLLGFLQRSSNFQCQKLLWQLNGRLEYCLKDRMNFDIPEEIKQLQQFQKEDAALTIYEMLQNIFAIFRQDSSSTGWNETIVENLLANVYHQINHLKTVLEHKLEKEDFTRGKLMSSLHLKRYYGRILHYLKAKEYSHCAWTIVRVEILRNFYFINRLTGYLRN

SEQ ID NO: 311 - protein, 166 aa, Homo sapiens
  IFNB_K105N
MSYNLLGFLQRSSNFQCQKLLWQLNGRLEYCLKDRMNFDIPEEIKQLQQFQKEDAALTIYEMLQNIFAIFRQDSSSTGWNETIVENLLANVYHQINHLKTVLEENLEKEDFTRGKLMSSLHLKRYYGRILHYLKAKEYSHCAWTIVRVEILRNFYFINRLTGYLRN

SEQ ID NO: 312 - protein, 166 aa, Homo sapiens
  IFNB_K105Q
MSYNLLGFLQRSSNFQCQKLLWQLNGRLEYCLKDRMNFDIPEEIKQLQQFQKEDAALTIYEMLQNIFAIFRQDSSSTGWNETIVENLLANVYHQINHLKTVLEEQLEKEDFTRGKLMSSLHLKRYYGRILHYLKAKEYSHCAWTIVRVEILRNFYFINRLTGYLRN

SEQ ID NO: 313 - protein, 166 aa, Homo sapiens
  IFNB_K105T
MSYNLLGFLQRSSNFQCQKLLWQLNGRLEYCLKDRMNFDIPEEIKQLQQFQKEDAALTIYEMLQNIFAIFRQDSSSTGWNETIVENLLANVYHQINHLKTVLEETLEKEDFTRGKLMSSLHLKRYYGRILHYLKAKEYSHCAWTIVRVEILRNFYFINRLTGYLRN

SEQ ID NO: 314 - protein, 166 aa, Homo sapiens
  IFNB_K105S
MSYNLLGFLQRSSNFQCQKLLWQLNGRLEYCLKDRMNFDIPEEIKQLQQFQKEDAALTIYEMLQNIFAIFRQDSSSTGWNETIVENLLANVYHQINHLKTVLEESLEKEDFTRGKLMSSLHLKRYYGRILHYLKAKEYSHCAWTIVRVEILRNFYFINRLTGYLRN

SEQ ID NO: 315 - protein, 166 aa, Homo sapiens
  IFNB_K105H
MSYNLLGFLQRSSNFQCQKLLWQLNGRLEYCLKDRMNFDIPEEIKQLQQFQKEDAALTIYEMLQNIFAIFRQDSSSTGWNETIVENLLANVYHQINHLKTVLEEHLEKEDFTRGKLMSSLHLKRYYGRILHYLKAKEYSHCAWTIVRVEILRNFYFINRLTGYLRN

SEQ ID NO: 316 - protein, 166 aa, Homo sapiens
  IFNB_L106I
MSYNLLGFLQRSSNFQCQKLLWQLNGRLEYCLKDRMNFDIPEEIKQLQQFQKEDAALTIYEMLQNIFAIFRQDSSSTGWNETIVENLLANVYHQINHLKTVLEEKIEKEDFTRGKLMSSLHLKRYYGRILHYLKAKEYSHCAWTIVRVEILRNFYFINRLTGYLRN

SEQ ID NO: 317 - protein, 166 aa, Homo sapiens
  IFNB_L106V
MSYNLLGFLQRSSNFQCQKLLWQLNGRLEYCLKDRMNFDIPEEIKQLQQFQKEDAALTIYEMLQNIFAIFRQDSSSTGWNETIVENLLANVYHQINHLKTVLEEKVEKEDFTRGKLMSSLHLKRYYGRILHYLKAKEYSHCAWTIVRVEILRNFYFINRLTGYLRN

SEQ ID NO: 318 - protein, 166 aa, Homo sapiens
  IFNB_E107N
MSYNLLGFLQRSSNFQCQKLLWQLNGRLEYCLKDRMNFDIPEEIKQLQQFQKEDAALTIYEMLQNIFAIFRQDSSSTGWNETIVENLLANVYHQINHLKTVLEEKLNKEDFTRGKLMSSLHLKRYYGRILHYLKAKEYSHCAWTIVRVEILRNFYFINRLTGYLRN

SEQ ID NO: 319 - protein, 166 aa, Homo sapiens
  IFNB_E107Q
MSYNLLGFLQRSSNFQCQKLLWQLNGRLEYCLKDRMNFDIPEEIKQLQQFQKEDAALTIYEMLQNIFAIFRQDSSSTGWNETIVENLLANVYHQINHLKTVLEEKLQKEDFTRGKLMSSLHLKRYYGRILHYLKAKEYSHCAWTIVRVEILRNFYFINRLTGYLRN

SEQ ID NO: 320 - protein, 166 aa, Homo sapiens
  IFNB_E107H
MSYNLLGFLQRSSNFQCQKLLWQLNGRLEYCLKDRMNFDIPEEIKQLQQFQKEDAALTIYEMLQNIFAIFRQDSSSTGWNETIVENLLANVYHQINHLKTVLEEKLHKEDFTRGKLMSSLHLKRYYGRILHYLKAKEYSHCAWTIVRVEILRNFYFINRLTGYLRN

SEQ ID NO: 321 - protein, 166 aa, Homo sapiens
  IFNB_K108N
MSYNLLGFLQRSSNFQCQKLLWQLNGRLEYCLKDRMNFDIPEEIKQLQQFQKEDAALTIYEMLQNIFAIFRQDSSSTGWNETIVENLLANVYHQINHLKTVLEEKLENEDFTRGKLMSSLHLKRYYGRILHYLKAKEYSHCAWTIVRVEILRNFYFINRLTGYLRN

SEQ ID NO: 322 - protein, 166 aa, Homo sapiens
  IFNB_K108Q
MSYNLLGFLQRSSNFQCQKLLWQLNGRLEYCLKDRMNFDIPEEIKQLQQFQKEDAALTIYEMLQNIFAIFRQDSSSTGWNETIVENLLANVYHQINHLKTVLEEKLEQEDFTRGKLMSSLHLKRYYGRILHYLKAKEYSHCAWTIVRVEILRNFYFINRLTGYLRN

SEQ ID NO: 323 - protein, 166 aa, Homo sapiens
  IFNB_K108T
MSYNLLGFLQRSSNFQCQKLLWQLNGRLEYCLKDRMNFDIPEEIKQLQQFQKEDAALTIYEMLQNIFAIFRQDSSSTGWNETIVENLLANVYHQINHLKTVLEEKLETEDFTRGKLMSSLHLKRYYGRILHYLKAKEYSHCAWTIVRVEILRNFYFINRLTGYLRN

SEQ ID NO: 324 - protein, 166 aa, Homo sapiens
  IFNB_K108S
MSYNLLGFLQRSSNFQCQKLLWQLNGRLEYCLKDRMNFDIPEEIKQLQQFQKEDAALTIYEMLQNIFAIFRQDSSSTGWNETIVENLLANVYHQINHLKTVLEEKLESEDFTRGKLMSSLHLKRYYGRILHYLKAKEYSHCAWTIVRVEILRNFYFINRLTGYLRN

SEQ ID NO: 325 - protein, 166 aa, Homo sapiens
  IFNB_K108H
MSYNLLGFLQRSSNFQCQKLLWQLNGRLEYCLKDRMNFDIPEEIKQLQQFQKEDAALTIYEMLQNIFAIFRQDSSSTGWNETIVENLLANVYHQINHLKTVLEEKLEHEDFTRGKLMSSLHLKRYYGRILHYLKAKEYSHCAWTIVRVEILRNFYFINRLTGYLRN

SEQ ID NO: 326 - protein, 166 aa, Homo sapiens
  IFNB_E109N
MSYNLLGFLQRSSNFQCQKLLWQLNGRLEYCLKDRMNFDIPEEIKQLQQFQKEDAALTIYEMLQNIFAIFRQDSSSTGWNETIVENLLANVYHQINHLKTVLEEKLEKNDFTRGKLMSSLHLKRYYGRILHYLKAKEYSHCAWTIVRVEILRNFYFINRLTGYLRN

SEQ ID NO: 327 - protein, 166 aa, Homo sapiens
  IFNB_E109Q
MSYNLLGFLQRSSNFQCQKLLWQLNGRLEYCLKDRMNFDIPEEIKQLQQFQKEDAALTIYEMLQNIFAIFRQDSSSTGWNETIVENLLANVYHQINHLKTVLEEKLEKQDFTRGKLMSSLHLKRYYGRILHYLKAKEYSHCAWTIVRVEILRNFYFINRLTGYLRN

SEQ ID NO: 328 - protein, 166 aa, Homo sapiens
  IFNB_E109H
MSYNLLGFLQRSSNFQCQKLLWQLNGRLEYCLKDRMNFDIPEEIKQLQQFQKEDAALTIYEMLQNIFAIFRQDSSSTGWNETIVENLLANVYHQINHLKTVLEEKLEKHDFTRGKLMSSLHLKRYYGRILHYLKAKEYSHCAWTIVRVEILRNFYFINRLTGYLRN

SEQ ID NO: 329 - protein, 166 aa, Homo sapiens
  IFNB_D110N
MSYNLLGFLQRSSNFQCQKLLWQLNGRLEYCLKDRMNFDIPEEIKQLQQFQKEDAALTIYEMLQNIFAIFRQDSSSTGWNETIVENLLANVYHQINHLKTVLEEKLEKENFTRGKLMSSLHLKRYYGRILHYLKAKEYSHCAWTIVRVEILRNFYFINRLTGYLRN

SEQ ID NO: 330 - protein, 166 aa, Homo sapiens
  IFNB_D110Q
MSYNLLGFLQRSSNFQCQKLLWQLNGRLEYCLKDRMNFDIPEEIKQLQQFQKEDAALTIYEMLQNIFAIFRQDSSSTGWNETIVENLLANVYHQINHLKTVLEEKLEKEQFTRGKLMSSLHLKRYYGRILHYLKAKEYSHCAWTIVRVEILRNFYFINRLTGYLRN

SEQ ID NO: 331 - protein, 166 aa, Homo sapiens
  IFNB_D110H
MSYNLLGFLQRSSNFQCQKLLWQLNGRLEYCLKDRMNFDIPEEIKQLQQFQKEDAALTIYEMLQNIFAIFRQDSSSTGWNETIVENLLANVYHQINHLKTVLEEKLEKEHFTRGKLMSSLHLKRYYGRILHYLKAKEYSHCAWTIVRVEILRNFYFINRLTGYLRN

SEQ ID NO: 332 - protein, 166 aa, Homo sapiens
  IFNB_D110G
MSYNLLGFLQRSSNFQCQKLLWQLNGRLEYCLKDRMNFDIPEEIKQLQQFQKEDAALTIYEMLQNIFAIFRQDSSSTGWNETIVENLLANVYHQINHLKTVLEEKLEKEGFTRGKLMSSLHLKRYYGRILHYLKAKEYSHCAWTIVRVEILRNFYFINRLTGYLRN

SEQ ID NO: 333 - protein, 166 aa, Homo sapiens
  IFNB_F111I
MSYNLLGFLQRSSNFQCQKLLWQLNGRLEYCLKDRMNFDIPEEIKQLQQFQKEDAALTIYEMLQNIFAIFRQDSSSTGWNETIVENLLANVYHQINHLKTVLEEKLEKEDITRGKLMSSLHLKRYYGRILHYLKAKEYSHCAWTIVRVEILRNFYFINRLTGYLRN

SEQ ID NO: 334 - protein, 166 aa, Homo sapiens
  IFNB_F111V
MSYNLLGFLQRSSNFQCQKLLWQLNGRLEYCLKDRMNFDIPEEIKQLQQFQKEDAALTIYEMLQNIFAIFRQDSSSTGWNETIVENLLANVYHQINHLKTVLEEKLEKEDVTRGKLMSSLHLKRYYGRILHYLKAKEYSHCAWTIVRVEILRNFYFINRLTGYLRN

SEQ ID NO: 335 - protein, 166 aa, Homo sapiens
  IFNB_R113H
MSYNLLGFLQRSSNFQCQKLLWQLNGRLEYCLKDRMNFDIPEEIKQLQQFQKEDAALTIYEMLQNIFAIFRQDSSSTGWNETIVENLLANVYHQINHLKTVLEEKLEKEDFTHGKLMSSLHLKRYYGRILHYLKAKEYSHCAWTIVRVEILRNFYFINRLTGYLRN

SEQ ID NO: 336 - protein, 166 aa, Homo sapiens
  IFNB_R113Q
MSYNLLGFLQRSSNFQCQKLLWQLNGRLEYCLKDRMNFDIPEEIKQLQQFQKEDAALTIYEMLQNIFAIFRQDSSSTGWNETIVENLLANVYHQINHLKTVLEEKLEKEDFTQGKLMSSLHLKRYYGRILHYLKAKEYSHCAWTIVRVEILRNFYFINRLTGYLRN

SEQ ID NO: 337 - protein, 166 aa, Homo sapiens
  IFNB_K115N
MSYNLLGFLQRSSNFQCQKLLWQLNGRLEYCLKDRMNFDIPEEIKQLQQFQKEDAALTIYEMLQNIFAIFRQDSSSTGWNETIVENLLANVYHQINHLKTVLEEKLEKEDFTRGNLMSSLHLKRYYGRILHYLKAKEYSHCAWTIVRVEILRNFYFINRLTGYLRN

SEQ ID NO: 338 - protein, 166 aa, Homo sapiens
  IFNB_K115Q
MSYNLLGFLQRSSNFQCQKLLWQLNGRLEYCLKDRMNFDIPEEIKQLQQFQKEDAALTIYEMLQNIFAIFRQDSSSTGWNETIVENLLANVYHQINHLKTVLEEKLEKEDFTRGQLMSSLHLKRYYGRILHYLKAKEYSHCAWTIVRVEILRNFYFINRLTGYLRN

SEQ ID NO: 339 - protein, 166 aa, Homo sapiens
  IFNB_L116I
MSYNLLGFLQRSSNFQCQKLLWQLNGRLEYCLKDRMNFDIPEEIKQLQQFQKEDAALTIYEMLQNIFAIFRQDSSSTGWNETIVENLLANVYHQINHLKTVLEEKLEKEDFTRGKIMSSLHLKRYYGRILHYLKAKEYSHCAWTIVRVEILRNFYFINRLTGYLRN

SEQ ID NO: 340 - protein, 166 aa, Homo sapiens
  IFNB_L116V
MSYNLLGFLQRSSNFQCQKLLWQLNGRLEYCLKDRMNFDIPEEIKQLQQFQKEDAALTIYEMLQNIFAIFRQDSSSTGWNETIVENLLANVYHQINHLKTVLEEKLEKEDFTRGKVMSSLHLKRYYGRILHYLKAKEYSHCAWTIVRVEILRNFYFINRLTGYLRN

SEQ ID NO: 341 - protein, 166 aa, Homo sapiens
  IFNB_L116T
MSYNLLGFLQRSSNFQCQKLLWQLNGRLEYCLKDRMNFDIPEEIKQLQQFQKEDAALTIYEMLQNIFAIFRQDSSSTGWNETIVENLLANVYHQINHLKTVLEEKLEKEDFTRGKTMSSLHLKRYYGRILHYLKAKEYSHCAWTIVRVEILRNFYFINRLTGYLRN

SEQ ID NO: 342 - protein, 166 aa, Homo sapiens
  IFNB_L116Q
MSYNLLGFLQRSSNFQCQKLLWQLNGRLEYCLKDRMNFDIPEEIKQLQQFQKEDAALTIYEMLQNIFAIFRQDSSSTGWNETIVENLLANVYHQINHLKTVLEEKLEKEDFTRGKQMSSLHLKRYYGRILHYLKAKEYSHCAWTIVRVEILRNFYFINRLTGYLRN

SEQ ID NO: 343 - protein, 166 aa, Homo sapiens
  IFNB_L116H
MSYNLLGFLQRSSNFQCQKLLWQLNGRLEYCLKDRMNFDIPEEIKQLQQFQKEDAALTIYEMLQNIFAIFRQDSSSTGWNETIVENLLANVYHQINHLKTVLEEKLEKEDFTRGKHMSSLHLKRYYGRILHYLKAKEYSHCAWTIVRVEILRNFYFINRLTGYLRN

SEQ ID NO: 344 - protein, 166 aa, Homo sapiens
  IFNB_L116A
MSYNLLGFLQRSSNFQCQKLLWQLNGRLEYCLKDRMNFDIPEEIKQLQQFQKEDAALTIYEMLQNIFAIFRQDSSSTGWNETIVENLLANVYHQINHLKTVLEEKLEKEDFTRGKAMSSLHLKRYYGRILHYLKAKEYSHCAWTIVRVEILRNFYFINRLTGYLRN

SEQ ID NO: 345 - protein, 166 aa, Homo sapiens
  IFNB_M117I
MSYNLLGFLQRSSNFQCQKLLWQLNGRLEYCLKDRMNFDIPEEIKQLQQFQKEDAALTIYEMLQNIFAIFRQDSSSTGWNETIVENLLANVYHQINHLKTVLEEKLEKEDFTRGKLISSLHLKRYYGRILHYLKAKEYSHCAWTIVRVEILRNFYFINRLTGYLRN

SEQ ID NO: 346 - protein, 166 aa, Homo sapiens
  IFNB_M117V
MSYNLLGFLQRSSNFQCQKLLWQLNGRLEYCLKDRMNFDIPEEIKQLQQFQKEDAALTIYEMLQNIFAIFRQDSSSTGWNETIVENLLANVYHQINHLKTVLEEKLEKEDFTRGKLVSSLHLKRYYGRILHYLKAKEYSHCAWTIVRVEILRNFYFINRLTGYLRN

SEQ ID NO: 347 - protein, 166 aa, Homo sapiens
  IFNB_L120I
MSYNLLGFLQRSSNFQCQKLLWQLNGRLEYCLKDRMNFDIPEEIKQLQQFQKEDAALTIYEMLQNIFAIFRQDSSSTGWNETIVENLLANVYHQINHLKTVLEEKLEKEDFTRGKLMSSIHLKRYYGRILHYLKAKEYSHCAWTIVRVEILRNFYFINRLTGYLRN

SEQ ID NO: 348 - protein, 166 aa, Homo sapiens
  IFNB_L120V
MSYNLLGFLQRSSNFQCQKLLWQLNGRLEYCLKDRMNFDIPEEIKQLQQFQKEDAALTIYEMLQNIFAIFRQDSSSTGWNETIVENLLANVYHQINHLKTVLEEKLEKEDFTRGKLMSSVHLKRYYGRILHYLKAKEYSHCAWTIVRVEILRNFYFINRLTGYLRN

SEQ ID NO: 349 - protein, 166 aa, Homo sapiens
  IFNB_L120T
MSYNLLGFLQRSSNFQCQKLLWQLNGRLEYCLKDRMNFDIPEEIKQLQQFQKEDAALTIYEMLQNIFAIFRQDSSSTGWNETIVENLLANVYHQINHLKTVLEEKLEKEDFTRGKLMSSTHLKRYYGRILHYLKAKEYSHCAWTIVRVEILRNFYFINRLTGYLRN

SEQ ID NO: 350 - protein, 166 aa, Homo sapiens
  IFNB_L120Q
MSYNLLGFLQRSSNFQCQKLLWQLNGRLEYCLKDRMNFDIPEEIKQLQQFQKEDAALTIYEMLQNIFAIFRQDSSSTGWNETIVENLLANVYHQINHLKTVLEEKLEKEDFTRGKLMSSQHLKRYYGRILHYLKAKEYSHCAWTIVRVEILRNFYFINRLTGYLRN

SEQ ID NO: 351 - protein, 166 aa, Homo sapiens
  IFNB_L120H
MSYNLLGFLQRSSNFQCQKLLWQLNGRLEYCLKDRMNFDIPEEIKQLQQFQKEDAALTIYEMLQNIFAIFRQDSSSTGWNETIVENLLANVYHQINHLKTVLEEKLEKEDFTRGKLMSSHHLKRYYGRILHYLKAKEYSHCAWTIVRVEILRNFYFINRLTGYLRN

SEQ ID NO: 352 - protein, 166 aa, Homo sapiens
  IFNB_L120A
MSYNLLGFLQRSSNFQCQKLLWQLNGRLEYCLKDRMNFDIPEEIKQLQQFQKEDAALTIYEMLQNIFAIFRQDSSSTGWNETIVENLLANVYHQINHLKTVLEEKLEKEDFTRGKLMSSAHLKRYYGRILHYLKAKEYSHCAWTIVRVEILRNFYFINRLTGYLRN

SEQ ID NO: 353 - protein, 166 aa, Homo sapiens
  IFNB_L122I
MSYNLLGFLQRSSNFQCQKLLWQLNGRLEYCLKDRMNFDIPEEIKQLQQFQKEDAALTIYEMLQNIFAIFRQDSSSTGWNETIVENLLANVYHQINHLKTVLEEKLEKEDFTRGKLMSSLHIKRYYGRILHYLKAKEYSHCAWTIVRVEILRNFYFINRLTGYLRN

SEQ ID NO: 354 - protein, 166 aa, Homo sapiens
  IFNB_L122V
MSYNLLGFLQRSSNFQCQKLLWQLNGRLEYCLKDRMNFDIPEEIKQLQQFQKEDAALTIYEMLQNIFAIFRQDSSSTGWNETIVENLLANVYHQINHLKTVLEEKLEKEDFTRGKLMSSLHVKRYYGRILHYLKAKEYSHCAWTIVRVEILRNFYFINRLTGYLRN

SEQ ID NO: 355 - protein, 166 aa, Homo sapiens
  IFNB_K123N
MSYNLLGFLQRSSNFQCQKLLWQLNGRLEYCLKDRMNFDIPEEIKQLQQFQKEDAALTIYEMLQNIFAIFRQDSSSTGWNETIVENLLANVYHQINHLKTVLEEKLEKEDFTRGKLMSSLHLNRYYGRILHYLKAKEYSHCAWTIVRVEILRNFYFINRLTGYLRN

SEQ ID NO: 356 - protein, 166 aa, Homo sapiens
  IFNB_K123Q
MSYNLLGFLQRSSNFQCQKLLWQLNGRLEYCLKDRMNFDIPEEIKQLQQFQKEDAALTIYEMLQNIFAIFRQDSSSTGWNETIVENLLANVYHQINHLKTVLEEKLEKEDFTRGKLMSSLHLQRYYGRILHYLKAKEYSHCAWTIVRVEILRNFYFINRLTGYLRN

SEQ ID NO: 357 - protein, 166 aa, Homo sapiens
  IFNB_K123T
MSYNLLGFLQRSSNFQCQKLLWQLNGRLEYCLKDRMNFDIPEEIKQLQQFQKEDAALTIYEMLQNIFAIFRQDSSSTGWNETIVENLLANVYHQINHLKTVLEEKLEKEDFTRGKLMSSLHLTRYYGRILHYLKAKEYSHCAWTIVRVEILRNFYFINRLTGYLRN

SEQ ID NO: 358 - protein, 166 aa, Homo sapiens
  IFNB_K123S
MSYNLLGFLQRSSNFQCQKLLWQLNGRLEYCLKDRMNFDIPEEIKQLQQFQKEDAALTIYEMLQNIFAIFRQDSSSTGWNETIVENLLANVYHQINHLKTVLEEKLEKEDFTRGKLMSSLHLSRYYGRILHYLKAKEYSHCAWTIVRVEILRNFYFINRLTGYLRN

SEQ ID NO: 359 - protein, 166 aa, Homo sapiens
  IFNB_K123H
MSYNLLGFLQRSSNFQCQKLLWQLNGRLEYCLKDRMNFDIPEEIKQLQQFQKEDAALTIYEMLQNIFAIFRQDSSSTGWNETIVENLLANVYHQINHLKTVLEEKLEKEDFTRGKLMSSLHLHRYYGRILHYLKAKEYSHCAWTIVRVEILRNFYFINRLTGYLRN

SEQ ID NO: 360 - protein, 166 aa, Homo sapiens
  IFNB_R124H
MSYNLLGFLQRSSNFQCQKLLWQLNGRLEYCLKDRMNFDIPEEIKQLQQFQKEDAALTIYEMLQNIFAIFRQDSSSTGWNETIVENLLANVYHQINHLKTVLEEKLEKEDFTRGKLMSSLHLKHYYGRILHYLKAKEYSHCAWTIVRVEILRNFYFINRLTGYLRN

SEQ ID NO: 361 - protein, 166 aa, Homo sapiens
  IFNB_R124Q
MSYNLLGFLQRSSNFQCQKLLWQLNGRLEYCLKDRMNFDIPEEIKQLQQFQKEDAALTIYEMLQNIFAIFRQDSSSTGWNETIVENLLANVYHQINHLKTVLEEKLEKEDFTRGKLMSSLHLKQYYGRILHYLKAKEYSHCAWTIVRVEILRNFYFINRLTGYLRN

SEQ ID NO: 362 - protein, 166 aa, Homo sapiens
  IFNB_Y125H
MSYNLLGFLQRSSNFQCQKLLWQLNGRLEYCLKDRMNFDIPEEIKQLQQFQKEDAALTIYEMLQNIFAIFRQDSSSTGWNETIVENLLANVYHQINHLKTVLEEKLEKEDFTRGKLMSSLHLKRHYGRILHYLKAKEYSHCAWTIVRVEILRNFYFINRLTGYLRN

SEQ ID NO: 363 - protein, 166 aa, Homo sapiens
  IFNB_Y125I
MSYNLLGFLQRSSNFQCQKLLWQLNGRLEYCLKDRMNFDIPEEIKQLQQFQKEDAALTIYEMLQNIFAIFRQDSSSTGWNETIVENLLANVYHQINHLKTVLEEKLEKEDFTRGKLMSSLHLKRIYGRILHYLKAKEYSHCAWTIVRVEILRNFYFINRLTGYLRN

SEQ ID NO: 364 - protein, 166 aa, Homo sapiens
  IFNB_Y126H
MSYNLLGFLQRSSNFQCQKLLWQLNGRLEYCLKDRMNFDIPEEIKQLQQFQKEDAALTIYEMLQNIFAIFRQDSSSTGWNETIVENLLANVYHQINHLKTVLEEKLEKEDFTRGKLMSSLHLKRYHGRILHYLKAKEYSHCAWTIVRVEILRNFYFINRLTGYLRN

SEQ ID NO: 365 - protein, 166 aa, Homo sapiens
  IFNB_Y126I
MSYNLLGFLQRSSNFQCQKLLWQLNGRLEYCLKDRMNFDIPEEIKQLQQFQKEDAALTIYEMLQNIFAIFRQDSSSTGWNETIVENLLANVYHQINHLKTVLEEKLEKEDFTRGKLMSSLHLKRYIGRILHYLKAKEYSHCAWTIVRVEILRNFYFINRLTGYLRN

SEQ ID NO: 366 - protein, 166 aa, Homo sapiens
  IFNB_R128H
MSYNLLGFLQRSSNFQCQKLLWQLNGRLEYCLKDRMNFDIPEEIKQLQQFQKEDAALTIYEMLQNIFAIFRQDSSSTGWNETIVENLLANVYHQINHLKTVLEEKLEKEDFTRGKLMSSLHLKRYYGHILHYLKAKEYSHCAWTIVRVEILRNFYFINRLTGYLRN

SEQ ID NO: 367 - protein, 166 aa, Homo sapiens
  IFNB_R128Q
MSYNLLGFLQRSSNFQCQKLLWQLNGRLEYCLKDRMNFDIPEEIKQLQQFQKEDAALTIYEMLQNIFAIFRQDSSSTGWNETIVENLLANVYHQINHLKTVLEEKLEKEDFTRGKLMSSLHLKRYYGQILHYLKAKEYSHCAWTIVRVEILRNFYFINRLTGYLRN

SEQ ID NO: 368 - protein, 166 aa, Homo sapiens
  IFNB_L130I
MSYNLLGFLQRSSNFQCQKLLWQLNGRLEYCLKDRMNFDIPEEIKQLQQFQKEDAALTIYEMLQNIFAIFRQDSSSTGWNETIVENLLANVYHQINHLKTVLEEKLEKEDFTRGKLMSSLHLKRYYGRIIHYLKAKEYSHCAWTIVRVEILRNFYFINRLTGYLRN

SEQ ID NO: 369 - protein, 166 aa, Homo sapiens
  IFNB_L130V
MSYNLLGFLQRSSNFQCQKLLWQLNGRLEYCLKDRMNFDIPEEIKQLQQFQKEDAALTIYEMLQNIFAIFRQDSSSTGWNETIVENLLANVYHQINHLKTVLEEKLEKEDFTRGKLMSSLHLKRYYGRIVHYLKAKEYSHCAWTIVRVEILRNFYFINRLTGYLRN

SEQ ID NO: 370 - protein, 166 aa, Homo sapiens
  IFNB_L130T
MSYNLLGFLQRSSNFQCQKLLWQLNGRLEYCLKDRMNFDIPEEIKQLQQFQKEDAALTIYEMLQNIFAIFRQDSSSTGWNETIVENLLANVYHQINHLKTVLEEKLEKEDFTRGKLMSSLHLKRYYGRITHYLKAKEYSHCAWTIVRVEILRNFYFINRLTGYLRN

SEQ ID NO: 371 - protein, 166 aa, Homo sapiens
  IFNB_L130Q
MSYNLLGFLQRSSNFQCQKLLWQLNGRLEYCLKDRMNFDIPEEIKQLQQFQKEDAALTIYEMLQNIFAIFRQDSSSTGWNETIVENLLANVYHQINHLKTVLEEKLEKEDFTRGKLMSSLHLKRYYGRIQHYLKAKEYSHCAWTIVRVEILRNFYFINRLTGYLRN

SEQ ID NO: 372 - protein, 166 aa, Homo sapiens
  IFNB_L130H
MSYNLLGFLQRSSNFQCQKLLWQLNGRLEYCLKDRMNFDIPEEIKQLQQFQKEDAALTIYEMLQNIFAIFRQDSSSTGWNETIVENLLANVYHQINHLKTVLEEKLEKEDFTRGKLMSSLHLKRYYGRIHHYLKAKEYSHCAWTIVRVEILRNFYFINRLTGYLRN

SEQ ID NO: 373 - protein, 166 aa, Homo sapiens
  IFNB_L130A
MSYNLLGFLQRSSNFQCQKLLWQLNGRLEYCLKDRMNFDIPEEIKQLQQFQKEDAALTIYEMLQNIFAIFRQDSSSTGWNETIVENLLANVYHQINHLKTVLEEKLEKEDFTRGKLMSSLHLKRYYGRIAHYLKAKEYSHCAWTIVRVEILRNFYFINRLTGYLRN

SEQ ID NO: 374 - protein, 166 aa, Homo sapiens
  IFNB_Y132H
MSYNLLGFLQRSSNFQCQKLLWQLNGRLEYCLKDRMNFDIPEEIKQLQQFQKEDAALTIYEMLQNIFAIFRQDSSSTGWNETIVENLLANVYHQINHLKTVLEEKLEKEDFTRGKLMSSLHLKRYYGRILHHLKAKEYSHCAWTIVRVEILRNFYFINRLTGYLRN

SEQ ID NO: 375 - protein, 166 aa, Homo sapiens
  IFNB_Y132I
MSYNLLGFLQRSSNFQCQKLLWQLNGRLEYCLKDRMNFDIPEEIKQLQQFQKEDAALTIYEMLQNIFAIFRQDSSSTGWNETIVENLLANVYHQINHLKTVLEEKLEKEDFTRGKLMSSLHLKRYYGRILHILKAKEYSHCAWTIVRVEILRNFYFINRLTGYLRN

SEQ ID NO: 376 - protein, 166 aa, Homo sapiens
  IFNB_L133I
MSYNLLGFLQRSSNFQCQKLLWQLNGRLEYCLKDRMNFDIPEEIKQLQQFQKEDAALTIYEMLQNIFAIFRQDSSSTGWNETIVENLLANVYHQINHLKTVLEEKLEKEDFTRGKLMSSLHLKRYYGRILHYIKAKEYSHCAWTIVRVEILRNFYFINRLTGYLRN

SEQ ID NO: 377 - protein, 166 aa, Homo sapiens
  IFNB_L133V
MSYNLLGFLQRSSNFQCQKLLWQLNGRLEYCLKDRMNFDIPEEIKQLQQFQKEDAALTIYEMLQNIFAIFRQDSSSTGWNETIVENLLANVYHQINHLKTVLEEKLEKEDFTRGKLMSSLHLKRYYGRILHYVKAKEYSHCAWTIVRVEILRNFYFINRLTGYLRN

SEQ ID NO: 378 - protein, 166 aa, Homo sapiens
  IFNB_K134N
MSYNLLGFLQRSSNFQCQKLLWQLNGRLEYCLKDRMNFDIPEEIKQLQQFQKEDAALTIYEMLQNIFAIFRQDSSSTGWNETIVENLLANVYHQINHLKTVLEEKLEKEDFTRGKLMSSLHLKRYYGRILHYLNAKEYSHCAWTIVRVEILRNFYFINRLTGYLRN

SEQ ID NO: 379 - protein, 166 aa, Homo sapiens
  IFNB_K134Q
MSYNLLGFLQRSSNFQCQKLLWQLNGRLEYCLKDRMNFDIPEEIKQLQQFQKEDAALTIYEMLQNIFAIFRQDSSSTGWNETIVENLLANVYHQINHLKTVLEEKLEKEDFTRGKLMSSLHLKRYYGRILHYLQAKEYSHCAWTIVRVEILRNFYFINRLTGYLRN

SEQ ID NO: 380 - protein, 166 aa, Homo sapiens
  IFNB_K134T
MSYNLLGFLQRSSNFQCQKLLWQLNGRLEYCLKDRMNFDIPEEIKQLQQFQKEDAALTIYEMLQNIFAIFRQDSSSTGWNETIVENLLANVYHQINHLKTVLEEKLEKEDFTRGKLMSSLHLKRYYGRILHYLTAKEYSHCAWTIVRVEILRNFYFINRLTGYLRN

SEQ ID NO: 381 - protein, 166 aa, Homo sapiens
  IFNB_K134S
MSYNLLGFLQRSSNFQCQKLLWQLNGRLEYCLKDRMNFDIPEEIKQLQQFQKEDAALTIYEMLQNIFAIFRQDSSSTGWNETIVENLLANVYHQINHLKTVLEEKLEKEDFTRGKLMSSLHLKRYYGRILHYLSAKEYSHCAWTIVRVEILRNFYFINRLTGYLRN

SEQ ID NO: 382 - protein, 166 aa, Homo sapiens
  IFNB_K134H
MSYNLLGFLQRSSNFQCQKLLWQLNGRLEYCLKDRMNFDIPEEIKQLQQFQKEDAALTIYEMLQNIFAIFRQDSSSTGWNETIVENLLANVYHQINHLKTVLEEKLEKEDFTRGKLMSSLHLKRYYGRILHYLHAKEYSHCAWTIVRVEILRNFYFINRLTGYLRN

SEQ ID NO: 383 - protein, 166 aa, Homo sapiens
  IFNB_K136N
MSYNLLGFLQRSSNFQCQKLLWQLNGRLEYCLKDRMNFDIPEEIKQLQQFQKEDAALTIYEMLQNIFAIFRQDSSSTGWNETIVENLLANVYHQINHLKTVLEEKLEKEDFTRGKLMSSLHLKRYYGRILHYLKANEYSHCAWTIVRVEILRNFYFINRLTGYLRN

SEQ ID NO: 384 - protein, 166 aa, Homo sapiens
  IFNB_K136Q
MSYNLLGFLQRSSNFQCQKLLWQLNGRLEYCLKDRMNFDIPEEIKQLQQFQKEDAALTIYEMLQNIFAIFRQDSSSTGWNETIVENLLANVYHQINHLKTVLEEKLEKEDFTRGKLMSSLHLKRYYGRILHYLKAQEYSHCAWTIVRVEILRNFYFINRLTGYLRN

SEQ ID NO: 385 - protein, 166 aa, Homo sapiens
  IFNB_K136T
MSYNLLGFLQRSSNFQCQKLLWQLNGRLEYCLKDRMNFDIPEEIKQLQQFQKEDAALTIYEMLQNIFAIFRQDSSSTGWNETIVENLLANVYHQINHLKTVLEEKLEKEDFTRGKLMSSLHLKRYYGRILHYLKATEYSHCAWTIVRVEILRNFYFINRLTGYLRN

SEQ ID NO: 386 - protein, 166 aa, Homo sapiens
  IFNB_K136S
MSYNLLGFLQRSSNFQCQKLLWQLNGRLEYCLKDRMNFDIPEEIKQLQQFQKEDAALTIYEMLQNIFAIFRQDSSSTGWNETIVENLLANVYHQINHLKTVLEEKLEKEDFTRGKLMSSLHLKRYYGRILHYLKASEYSHCAWTIVRVEILRNFYFINRLTGYLRN

SEQ ID NO: 387 - protein, 166 aa, Homo sapiens
  IFNB_K136H
MSYNLLGFLQRSSNFQCQKLLWQLNGRLEYCLKDRMNFDIPEEIKQLQQFQKEDAALTIYEMLQNIFAIFRQDSSSTGWNETIVENLLANVYHQINHLKTVLEEKLEKEDFTRGKLMSSLHLKRYYGRILHYLKAHEYSHCAWTIVRVEILRNFYFINRLTGYLRN

SEQ ID NO: 388 - protein, 166 aa, Homo sapiens
  IFNB_E137N
MSYNLLGFLQRSSNFQCQKLLWQLNGRLEYCLKDRMNFDIPEEIKQLQQFQKEDAALTIYEMLQNIFAIFRQDSSSTGWNETIVENLLANVYHQINHLKTVLEEKLEKEDFTRGKLMSSLHLKRYYGRILHYLKAKNYSHCAWTIVRVEILRNFYFINRLTGYLRN

SEQ ID NO: 389 - protein, 166 aa, Homo sapiens
  IFNB_E137Q
MSYNLLGFLQRSSNFQCQKLLWQLNGRLEYCLKDRMNFDIPEEIKQLQQFQKEDAALTIYEMLQNIFAIFRQDSSSTGWNETIVENLLANVYHQINHLKTVLEEKLEKEDFTRGKLMSSLHLKRYYGRILHYLKAKQYSHCAWTIVRVEILRNFYFINRLTGYLRN

SEQ ID NO: 390 - protein, 166 aa, Homo sapiens
  IFNB_E137H
MSYNLLGFLQRSSNFQCQKLLWQLNGRLEYCLKDRMNFDIPEEIKQLQQFQKEDAALTIYEMLQNIFAIFRQDSSSTGWNETIVENLLANVYHQINHLKTVLEEKLEKEDFTRGKLMSSLHLKRYYGRILHYLKAKHYSHCAWTIVRVEILRNFYFINRLTGYLRN

SEQ ID NO: 391 - protein, 166 aa, Homo sapiens
  IFNB_Y138H
MSYNLLGFLQRSSNFQCQKLLWQLNGRLEYCLKDRMNFDIPEEIKQLQQFQKEDAALTIYEMLQNIFAIFRQDSSSTGWNETIVENLLANVYHQINHLKTVLEEKLEKEDFTRGKLMSSLHLKRYYGRILHYLKAKEHSHCAWTIVRVEILRNFYFINRLTGYLRN

SEQ ID NO: 392 - protein, 166 aa, Homo sapiens
  IFNB_Y138I
MSYNLLGFLQRSSNFQCQKLLWQLNGRLEYCLKDRMNFDIPEEIKQLQQFQKEDAALTIYEMLQNIFAIFRQDSSSTGWNETIVENLLANVYHQINHLKTVLEEKLEKEDFTRGKLMSSLHLKRYYGRILHYLKAKEISHCAWTIVRVEILRNFYFINRLTGYLRN

SEQ ID NO: 393 - protein, 166 aa, Homo sapiens
  IFNB_W143S
MSYNLLGFLQRSSNFQCQKLLWQLNGRLEYCLKDRMNFDIPEEIKQLQQFQKEDAALTIYEMLQNIFAIFRQDSSSTGWNETIVENLLANVYHQINHLKTVLEEKLEKEDFTRGKLMSSLHLKRYYGRILHYLKAKEYSHCASTIVRVEILRNFYFINRLTGYLRN

SEQ ID NO: 394 - protein, 166 aa, Homo sapiens
  IFNB_W143H
MSYNLLGFLQRSSNFQCQKLLWQLNGRLEYCLKDRMNFDIPEEIKQLQQFQKEDAALTIYEMLQNIFAIFRQDSSSTGWNETIVENLLANVYHQINHLKTVLEEKLEKEDFTRGKLMSSLHLKRYYGRILHYLKAKEYSHCAHTIVRVEILRNFYFINRLTGYLRN

SEQ ID NO: 395 - protein, 166 aa, Homo sapiens
  IFNB_R147H
MSYNLLGFLQRSSNFQCQKLLWQLNGRLEYCLKDRMNFDIPEEIKQLQQFQKEDAALTIYEMLQNIFAIFRQDSSSTGWNETIVENLLANVYHQINHLKTVLEEKLEKEDFTRGKLMSSLHLKRYYGRILHYLKAKEYSHCAWTIVHVEILRNFYFINRLTGYLRN

SEQ ID NO: 396 - protein, 166 aa, Homo sapiens
  IFNB_R147Q
MSYNLLGFLQRSSNFQCQKLLWQLNGRLEYCLKDRMNFDIPEEIKQLQQFQKEDAALTIYEMLQNIFAIFRQDSSSTGWNETIVENLLANVYHQINHLKTVLEEKLEKEDFTRGKLMSSLHLKRYYGRILHYLKAKEYSHCAWTIVQVEILRNFYFINRLTGYLRN

SEQ ID NO: 397 - protein, 166 aa, Homo sapiens
  IFNB_E149N
MSYNLLGFLQRSSNFQCQKLLWQLNGRLEYCLKDRMNFDIPEEIKQLQQFQKEDAALTIYEMLQNIFAIFRQDSSSTGWNETIVENLLANVYHQINHLKTVLEEKLEKEDFTRGKLMSSLHLKRYYGRILHYLKAKEYSHCAWTIVRVNILRNFYFINRLTGYLRN

SEQ ID NO: 398 - protein, 166 aa, Homo sapiens
  IFNB_E149Q
MSYNLLGFLQRSSNFQCQKLLWQLNGRLEYCLKDRMNFDIPEEIKQLQQFQKEDAALTIYEMLQNIFAIFRQDSSSTGWNETIVENLLANVYHQINHLKTVLEEKLEKEDFTRGKLMSSLHLKRYYGRILHYLKAKEYSHCAWTIVRVQILRNFYFINRLTGYLRN

SEQ ID NO: 399 - protein, 166 aa, Homo sapiens
  IFNB_E149H
MSYNLLGFLQRSSNFQCQKLLWQLNGRLEYCLKDRMNFDIPEEIKQLQQFQKEDAALTIYEMLQNIFAIFRQDSSSTGWNETIVENLLANVYHQINHLKTVLEEKLEKEDFTRGKLMSSLHLKRYYGRILHYLKAKEYSHCAWTIVRVHILRNFYFINRLTGYLRN

SEQ ID NO: 400 - protein, 166 aa, Homo sapiens
  IFNB_L151I
MSYNLLGFLQRSSNFQCQKLLWQLNGRLEYCLKDRMNFDIPEEIKQLQQFQKEDAALTIYEMLQNIFAIFRQDSSSTGWNETIVENLLANVYHQINHLKTVLEEKLEKEDFTRGKLMSSLHLKRYYGRILHYLKAKEYSHCAWTIVRVEIIRNFYFINRLTGYLRN

SEQ ID NO: 401 - protein, 166 aa, Homo sapiens
  IFNB_L151V
MSYNLLGFLQRSSNFQCQKLLWQLNGRLEYCLKDRMNFDIPEEIKQLQQFQKEDAALTIYEMLQNIFAIFRQDSSSTGWNETIVENLLANVYHQINHLKTVLEEKLEKEDFTRGKLMSSLHLKRYYGRILHYLKAKEYSHCAWTIVRVEIVRNFYFINRLTGYLRN

SEQ ID NO: 402 - protein, 166 aa, Homo sapiens
  IFNB_R152H
MSYNLLGFLQRSSNFQCQKLLWQLNGRLEYCLKDRMNFDIPEEIKQLQQFQKEDAALTIYEMLQNIFAIFRQDSSSTGWNETIVENLLANVYHQINHLKTVLEEKLEKEDFTRGKLMSSLHLKRYYGRILHYLKAKEYSHCAWTIVRVEILHNFYFINRLTGYLRN

SEQ ID NO: 403 - protein, 166 aa, Homo sapiens
  IFNB_R152Q
MSYNLLGFLQRSSNFQCQKLLWQLNGRLEYCLKDRMNFDIPEEIKQLQQFQKEDAALTIYEMLQNIFAIFRQDSSSTGWNETIVENLLANVYHQINHLKTVLEEKLEKEDFTRGKLMSSLHLKRYYGRILHYLKAKEYSHCAWTIVRVEILQNFYFINRLTGYLRN

SEQ ID NO: 404 - protein, 166 aa, Homo sapiens
  IFNB_F154I
MSYNLLGFLQRSSNFQCQKLLWQLNGRLEYCLKDRMNFDIPEEIKQLQQFQKEDAALTIYEMLQNIFAIFRQDSSSTGWNETIVENLLANVYHQINHLKTVLEEKLEKEDFTRGKLMSSLHLKRYYGRILHYLKAKEYSHCAWTIVRVEILRNIYFINRLTGYLRN

SEQ ID NO: 405 - protein, 166 aa, Homo sapiens
  IFNB_F154V
MSYNLLGFLQRSSNFQCQKLLWQLNGRLEYCLKDRMNFDIPEEIKQLQQFQKEDAALTIYEMLQNIFAIFRQDSSSTGWNETIVENLLANVYHQINHLKTVLEEKLEKEDFTRGKLMSSLHLKRYYGRILHYLKAKEYSHCAWTIVRVEILRNVYFINRLTGYLRN

SEQ ID NO: 406 - protein, 166 aa, Homo sapiens
  IFNB_Y155H
MSYNLLGFLQRSSNFQCQKLLWQLNGRLEYCLKDRMNFDIPEEIKQLQQFQKEDAALTIYEMLQNIFAIFRQDSSSTGWNETIVENLLANVYHQINHLKTVLEEKLEKEDFTRGKLMSSLHLKRYYGRILHYLKAKEYSHCAWTIVRVEILRNFHFINRLTGYLRN

SEQ ID NO: 407 - protein, 166 aa, Homo sapiens
  IFNB_Y155I
MSYNLLGFLQRSSNFQCQKLLWQLNGRLEYCLKDRMNFDIPEEIKQLQQFQKEDAALTIYEMLQNIFAIFRQDSSSTGWNETIVENLLANVYHQINHLKTVLEEKLEKEDFTRGKLMSSLHLKRYYGRILHYLKAKEYSHCAWTIVRVEILRNFIFINRLTGYLRN

SEQ ID NO: 408 - protein, 166 aa, Homo sapiens
  IFNB_F156I
MSYNLLGFLQRSSNFQCQKLLWQLNGRLEYCLKDRMNFDIPEEIKQLQQFQKEDAALTIYEMLQNIFAIFRQDSSSTGWNETIVENLLANVYHQINHLKTVLEEKLEKEDFTRGKLMSSLHLKRYYGRILHYLKAKEYSHCAWTIVRVEILRNFYIINRLTGYLRN

SEQ ID NO: 409 - protein, 166 aa, Homo sapiens
  IFNB_F156V
MSYNLLGFLQRSSNFQCQKLLWQLNGRLEYCLKDRMNFDIPEEIKQLQQFQKEDAALTIYEMLQNIFAIFRQDSSSTGWNETIVENLLANVYHQINHLKTVLEEKLEKEDFTRGKLMSSLHLKRYYGRILHYLKAKEYSHCAWTIVRVEILRNFYVINRLTGYLRN

SEQ ID NO: 410 - protein, 166 aa, Homo sapiens
  IFNB_R159H
MSYNLLGFLQRSSNFQCQKLLWQLNGRLEYCLKDRMNFDIPEEIKQLQQFQKEDAALTIYEMLQNIFAIFRQDSSSTGWNETIVENLLANVYHQINHLKTVLEEKLEKEDFTRGKLMSSLHLKRYYGRILHYLKAKEYSHCAWTIVRVEILRNFYFINHLTGYLRN

SEQ ID NO: 411 - protein, 166 aa, Homo sapiens
  IFNB_R159Q
MSYNLLGFLQRSSNFQCQKLLWQLNGRLEYCLKDRMNFDIPEEIKQLQQFQKEDAALTIYEMLQNIFAIFRQDSSSTGWNETIVENLLANVYHQINHLKTVLEEKLEKEDFTRGKLMSSLHLKRYYGRILHYLKAKEYSHCAWTIVRVEILRNFYFINQLTGYLRN

SEQ ID NO: 412 - protein, 166 aa, Homo sapiens
  IFNB_L160I
MSYNLLGFLQRSSNFQCQKLLWQLNGRLEYCLKDRMNFDIPEEIKQLQQFQKEDAALTIYEMLQNIFAIFRQDSSSTGWNETIVENLLANVYHQINHLKTVLEEKLEKEDFTRGKLMSSLHLKRYYGRILHYLKAKEYSHCAWTIVRVEILRNFYFINRITGYLRN

SEQ ID NO: 413 - protein, 166 aa, Homo sapiens
  IFNB_L160V
MSYNLLGFLQRSSNFQCQKLLWQLNGRLEYCLKDRMNFDIPEEIKQLQQFQKEDAALTIYEMLQNIFAIFRQDSSSTGWNETIVENLLANVYHQINHLKTVLEEKLEKEDFTRGKLMSSLHLKRYYGRILHYLKAKEYSHCAWTIVRVEILRNFYFINRVTGYLRN

SEQ ID NO: 414 - protein, 166 aa, Homo sapiens
  IFNB_Y163H
MSYNLLGFLQRSSNFQCQKLLWQLNGRLEYCLKDRMNFDIPEEIKQLQQFQKEDAALTIYEMLQNIFAIFRQDSSSTGWNETIVENLLANVYHQINHLKTVLEEKLEKEDFTRGKLMSSLHLKRYYGRILHYLKAKEYSHCAWTIVRVEILRNFYFINRLTGHLRN

SEQ ID NO: 415 - protein, 166 aa, Homo sapiens
  IFNB_Y163I
MSYNLLGFLQRSSNFQCQKLLWQLNGRLEYCLKDRMNFDIPEEIKQLQQFQKEDAALTIYEMLQNIFAIFRQDSSSTGWNETIVENLLANVYHQINHLKTVLEEKLEKEDFTRGKLMSSLHLKRYYGRILHYLKAKEYSHCAWTIVRVEILRNFYFINRLTGILRN

SEQ ID NO: 416 - protein, 166 aa, Homo sapiens
  IFNB_L164I
MSYNLLGFLQRSSNFQCQKLLWQLNGRLEYCLKDRMNFDIPEEIKQLQQFQKEDAALTIYEMLQNIFAIFRQDSSSTGWNETIVENLLANVYHQINHLKTVLEEKLEKEDFTRGKLMSSLHLKRYYGRILHYLKAKEYSHCAWTIVRVEILRNFYFINRLTGYIRN

SEQ ID NO: 417 - protein, 166 aa, Homo sapiens
  IFNB_L164V
MSYNLLGFLQRSSNFQCQKLLWQLNGRLEYCLKDRMNFDIPEEIKQLQQFQKEDAALTIYEMLQNIFAIFRQDSSSTGWNETIVENLLANVYHQINHLKTVLEEKLEKEDFTRGKLMSSLHLKRYYGRILHYLKAKEYSHCAWTIVRVEILRNFYFINRLTGYVRN

SEQ ID NO: 418 - protein, 166 aa, Homo sapiens
  IFNB_R165H
MSYNLLGFLQRSSNFQCQKLLWQLNGRLEYCLKDRMNFDIPEEIKQLQQFQKEDAALTIYEMLQNIFAIFRQDSSSTGWNETIVENLLANVYHQINHLKTVLEEKLEKEDFTRGKLMSSLHLKRYYGRILHYLKAKEYSHCAWTIVRVEILRNFYFINRLTGYLHN

SEQ ID NO: 419 - protein, 166 aa, Homo sapiens
  IFNB_R165Q
MSYNLLGFLQRSSNFQCQKLLWQLNGRLEYCLKDRMNFDIPEEIKQLQQFQKEDAALTIYEMLQNIFAIFRQDSSSTGWNETIVENLLANVYHQINHLKTVLEEKLEKEDFTRGKLMSSLHLKRYYGRILHYLKAKEYSHCAWTIVRVEILRNFYFINRLTGYLQN

SEQ ID NO: 420 - protein, 166 aa, Homo sapiens
  IFNB_M1D
DSYNLLGFLQRSSNFQCQKLLWQLNGRLEYCLKDRMNFDIPEEIKQLQQFQKEDAALTIYEMLQNIFAIFRQDSSSTGWNETIVENLLANVYHQINHLKTVLEEKLEKEDFTRGKLMSSLHLKRYYGRILHYLKAKEYSHCAWTIVRVEILRNFYFINRLTGYLRN

SEQ ID NO: 421 - protein, 166 aa, Homo sapiens
  IFNB_M1E
ESYNLLGFLQRSSNFQCQKLLWQLNGRLEYCLKDRMNFDIPEEIKQLQQFQKEDAALTIYEMLQNIFAIFRQDSSSTGWNETIVENLLANVYHQINHLKTVLEEKLEKEDFTRGKLMSSLHLKRYYGRILHYLKAKEYSHCAWTIVRVEILRNFYFINRLTGYLRN

SEQ ID NO: 422 - protein, 166 aa, Homo sapiens
  IFNB_M1K
KSYNLLGFLQRSSNFQCQKLLWQLNGRLEYCLKDRMNFDIPEEIKQLQQFQKEDAALTIYEMLQNIFAIFRQDSSSTGWNETIVENLLANVYHQINHLKTVLEEKLEKEDFTRGKLMSSLHLKRYYGRILHYLKAKEYSHCAWTIVRVEILRNFYFINRLTGYLRN

SEQ ID NO: 423 - protein, 166 aa, Homo sapiens
  IFNB_M1N
NSYNLLGFLQRSSNFQCQKLLWQLNGRLEYCLKDRMNFDIPEEIKQLQQFQKEDAALTIYEMLQNIFAIFRQDSSSTGWNETIVENLLANVYHQINHLKTVLEEKLEKEDFTRGKLMSSLHLKRYYGRILHYLKAKEYSHCAWTIVRVEILRNFYFINRLTGYLRN

SEQ ID NO: 424 - protein, 166 aa, Homo sapiens
  IFNB_M1R
RSYNLLGFLQRSSNFQCQKLLWQLNGRLEYCLKDRMNFDIPEEIKQLQQFQKEDAALTIYEMLQNIFAIFRQDSSSTGWNETIVENLLANVYHQINHLKTVLEEKLEKEDFTRGKLMSSLHLKRYYGRILHYLKAKEYSHCAWTIVRVEILRNFYFINRLTGYLRN

SEQ ID NO: 425 - protein, 166 aa, Homo sapiens
  IFNB_M1S
SSYNLLGFLQRSSNFQCQKLLWQLNGRLEYCLKDRMNFDIPEEIKQLQQFQKEDAALTIYEMLQNIFAIFRQDSSSTGWNETIVENLLANVYHQINHLKTVLEEKLEKEDFTRGKLMSSLHLKRYYGRILHYLKAKEYSHCAWTIVRVEILRNFYFINRLTGYLRN

SEQ ID NO: 426 - protein, 166 aa, Homo sapiens
  IFNB_L5D
MSYNDLGFLQRSSNFQCQKLLWQLNGRLEYCLKDRMNFDIPEEIKQLQQFQKEDAALTIYEMLQNIFAIFRQDSSSTGWNETIVENLLANVYHQINHLKTVLEEKLEKEDFTRGKLMSSLHLKRYYGRILHYLKAKEYSHCAWTIVRVEILRNFYFINRLTGYLRN

SEQ ID NO: 427 - protein, 166 aa, Homo sapiens
  IFNB_L5E
MSYNELGFLQRSSNFQCQKLLWQLNGRLEYCLKDRMNFDIPEEIKQLQQFQKEDAALTIYEMLQNIFAIFRQDSSSTGWNETIVENLLANVYHQINHLKTVLEEKLEKEDFTRGKLMSSLHLKRYYGRILHYLKAKEYSHCAWTIVRVEILRNFYFINRLTGYLRN

SEQ ID NO: 428 - protein, 166 aa, Homo sapiens
  IFNB_L5K
MSYNKLGFLQRSSNFQCQKLLWQLNGRLEYCLKDRMNFDIPEEIKQLQQFQKEDAALTIYEMLQNIFAIFRQDSSSTGWNETIVENLLANVYHQINHLKTVLEEKLEKEDFTRGKLMSSLHLKRYYGRILHYLKAKEYSHCAWTIVRVEILRNFYFINRLTGYLRN

SEQ ID NO: 429 - protein, 166 aa, Homo sapiens
  IFNB_L5R
MSYNRLGFLQRSSNFQCQKLLWQLNGRLEYCLKDRMNFDIPEEIKQLQQFQKEDAALTIYEMLQNIFAIFRQDSSSTGWNETIVENLLANVYHQINHLKTVLEEKLEKEDFTRGKLMSSLHLKRYYGRILHYLKAKEYSHCAWTIVRVEILRNFYFINRLTGYLRN

SEQ ID NO: 430 - protein, 166 aa, Homo sapiens
  IFNB_L5N
MSYNNLGFLQRSSNFQCQKLLWQLNGRLEYCLKDRMNFDIPEEIKQLQQFQKEDAALTIYEMLQNIFAIFRQDSSSTGWNETIVENLLANVYHQINHLKTVLEEKLEKEDFTRGKLMSSLHLKRYYGRILHYLKAKEYSHCAWTIVRVEILRNFYFINRLTGYLRN

SEQ ID NO: 431 - protein, 166 aa, Homo sapiens
  IFNB_L5S
MSYNSLGFLQRSSNFQCQKLLWQLNGRLEYCLKDRMNFDIPEEIKQLQQFQKEDAALTIYEMLQNIFAIFRQDSSSTGWNETIVENLLANVYHQINHLKTVLEEKLEKEDFTRGKLMSSLHLKRYYGRILHYLKAKEYSHCAWTIVRVEILRNFYFINRLTGYLRN

SEQ ID NO: 432 - protein, 166 aa, Homo sapiens
  IFNB_L6D
MSYNLDGFLQRSSNFQCQKLLWQLNGRLEYCLKDRMNFDIPEEIKQLQQFQKEDAALTIYEMLQNIFAIFRQDSSSTGWNETIVENLLANVYHQINHLKTVLEEKLEKEDFTRGKLMSSLHLKRYYGRILHYLKAKEYSHCAWTIVRVEILRNFYFINRLTGYLRN

SEQ ID NO: 433 - protein, 166 aa, Homo sapiens
  IFNB_L6E
MSYNLEGFLQRSSNFQCQKLLWQLNGRLEYCLKDRMNFDIPEEIKQLQQFQKEDAALTIYEMLQNIFAIFRQDSSSTGWNETIVENLLANVYHQINHLKTVLEEKLEKEDFTRGKLMSSLHLKRYYGRILHYLKAKEYSHCAWTIVRVEILRNFYFINRLTGYLRN

SEQ ID NO: 434 - protein, 166 aa, Homo sapiens
  IFNB_L6K
MSYNLKGFLQRSSNFQCQKLLWQLNGRLEYCLKDRMNFDIPEEIKQLQQFQKEDAALTIYEMLQNIFAIFRQDSSSTGWNETIVENLLANVYHQINHLKTVLEEKLEKEDFTRGKLMSSLHLKRYYGRILHYLKAKEYSHCAWTIVRVEILRNFYFINRLTGYLRN

SEQ ID NO: 435 - protein, 166 aa, Homo sapiens
  IFNB_L6N
MSYNLNGFLQRSSNFQCQKLLWQLNGRLEYCLKDRMNFDIPEEIKQLQQFQKEDAALTIYEMLQNIFAIFRQDSSSTGWNETIVENLLANVYHQINHLKTVLEEKLEKEDFTRGKLMSSLHLKRYYGRILHYLKAKEYSHCAWTIVRVEILRNFYFINRLTGYLRN

SEQ ID NO: 436 - protein, 166 aa, Homo sapiens
  IFNB_L6Q
MSYNLQGFLQRSSNFQCQKLLWQLNGRLEYCLKDRMNFDIPEEIKQLQQFQKEDAALTIYEMLQNIFAIFRQDSSSTGWNETIVENLLANVYHQINHLKTVLEEKLEKEDFTRGKLMSSLHLKRYYGRILHYLKAKEYSHCAWTIVRVEILRNFYFINRLTGYLRN

SEQ ID NO: 437 - protein, 166 aa, Homo sapiens
  IFNB_L6R
MSYNLRGFLQRSSNFQCQKLLWQLNGRLEYCLKDRMNFDIPEEIKQLQQFQKEDAALTIYEMLQNIFAIFRQDSSSTGWNETIVENLLANVYHQINHLKTVLEEKLEKEDFTRGKLMSSLHLKRYYGRILHYLKAKEYSHCAWTIVRVEILRNFYFINRLTGYLRN

SEQ ID NO: 438 - protein, 166 aa, Homo sapiens
  IFNB_L6S
MSYNLSGFLQRSSNFQCQKLLWQLNGRLEYCLKDRMNFDIPEEIKQLQQFQKEDAALTIYEMLQNIFAIFRQDSSSTGWNETIVENLLANVYHQINHLKTVLEEKLEKEDFTRGKLMSSLHLKRYYGRILHYLKAKEYSHCAWTIVRVEILRNFYFINRLTGYLRN

SEQ ID NO: 439 - protein, 166 aa, Homo sapiens
  IFNB_L6T
MSYNLTGFLQRSSNFQCQKLLWQLNGRLEYCLKDRMNFDIPEEIKQLQQFQKEDAALTIYEMLQNIFAIFRQDSSSTGWNETIVENLLANVYHQINHLKTVLEEKLEKEDFTRGKLMSSLHLKRYYGRILHYLKAKEYSHCAWTIVRVEILRNFYFINRLTGYLRN

SEQ ID NO: 440 - protein, 166 aa, Homo sapiens
  IFNB_F8D
MSYNLLGDLQRSSNFQCQKLLWQLNGRLEYCLKDRMNFDIPEEIKQLQQFQKEDAALTIYEMLQNIFAIFRQDSSSTGWNETIVENLLANVYHQINHLKTVLEEKLEKEDFTRGKLMSSLHLKRYYGRILHYLKAKEYSHCAWTIVRVEILRNFYFINRLTGYLRN

SEQ ID NO: 441 - protein, 166 aa, Homo sapiens
  IFNB_F8E
MSYNLLGELQRSSNFQCQKLLWQLNGRLEYCLKDRMNFDIPEEIKQLQQFQKEDAALTIYEMLQNIFAIFRQDSSSTGWNETIVENLLANVYHQINHLKTVLEEKLEKEDFTRGKLMSSLHLKRYYGRILHYLKAKEYSHCAWTIVRVEILRNFYFINRLTGYLRN

SEQ ID NO: 442 - protein, 166 aa, Homo sapiens
  IFNB_F8K
MSYNLLGKLQRSSNFQCQKLLWQLNGRLEYCLKDRMNFDIPEEIKQLQQFQKEDAALTIYEMLQNIFAIFRQDSSSTGWNETIVENLLANVYHQINHLKTVLEEKLEKEDFTRGKLMSSLHLKRYYGRILHYLKAKEYSHCAWTIVRVEILRNFYFINRLTGYLRN

SEQ ID NO: 443 - protein, 166 aa, Homo sapiens
  IFNB_F8R
MSYNLLGRLQRSSNFQCQKLLWQLNGRLEYCLKDRMNFDIPEEIKQLQQFQKEDAALTIYEMLQNIFAIFRQDSSSTGWNETIVENLLANVYHQINHLKTVLEEKLEKEDFTRGKLMSSLHLKRYYGRILHYLKAKEYSHCAWTIVRVEILRNFYFINRLTGYLRN

SEQ ID NO: 444 - protein, 166 aa, Homo sapiens
  IFNB_L9D
MSYNLLGFDQRSSNFQCQKLLWQLNGRLEYCLKDRMNFDIPEEIKQLQQFQKEDAALTIYEMLQNIFAIFRQDSSSTGWNETIVENLLANVYHQINHLKTVLEEKLEKEDFTRGKLMSSLHLKRYYGRILHYLKAKEYSHCAWTIVRVEILRNFYFINRLTGYLRN

SEQ ID NO: 445 - protein, 166 aa, Homo sapiens
  IFNB_L9E
MSYNLLGFEQRSSNFQCQKLLWQLNGRLEYCLKDRMNFDIPEEIKQLQQFQKEDAALTIYEMLQNIFAIFRQDSSSTGWNETIVENLLANVYHQINHLKTVLEEKLEKEDFTRGKLMSSLHLKRYYGRILHYLKAKEYSHCAWTIVRVEILRNFYFINRLTGYLRN

SEQ ID NO: 446 - protein, 166 aa, Homo sapiens
  IFNB_L9K
MSYNLLGFKQRSSNFQCQKLLWQLNGRLEYCLKDRMNFDIPEEIKQLQQFQKEDAALTIYEMLQNIFAIFRQDSSSTGWNETIVENLLANVYHQINHLKTVLEEKLEKEDFTRGKLMSSLHLKRYYGRILHYLKAKEYSHCAWTIVRVEILRNFYFINRLTGYLRN

SEQ ID NO: 447 - protein, 166 aa, Homo sapiens
  IFNB_L9N
MSYNLLGFNQRSSNFQCQKLLWQLNGRLEYCLKDRMNFDIPEEIKQLQQFQKEDAALTIYEMLQNIFAIFRQDSSSTGWNETIVENLLANVYHQINHLKTVLEEKLEKEDFTRGKLMSSLHLKRYYGRILHYLKAKEYSHCAWTIVRVEILRNFYFINRLTGYLRN

SEQ ID NO: 448 - protein, 166 aa, Homo sapiens
  IFNB_L9R
MSYNLLGFRQRSSNFQCQKLLWQLNGRLEYCLKDRMNFDIPEEIKQLQQFQKEDAALTIYEMLQNIFAIFRQDSSSTGWNETIVENLLANVYHQINHLKTVLEEKLEKEDFTRGKLMSSLHLKRYYGRILHYLKAKEYSHCAWTIVRVEILRNFYFINRLTGYLRN

SEQ ID NO: 449 - protein, 166 aa, Homo sapiens
  IFNB_L9S
MSYNLLGFSQRSSNFQCQKLLWQLNGRLEYCLKDRMNFDIPEEIKQLQQFQKEDAALTIYEMLQNIFAIFRQDSSSTGWNETIVENLLANVYHQINHLKTVLEEKLEKEDFTRGKLMSSLHLKRYYGRILHYLKAKEYSHCAWTIVRVEILRNFYFINRLTGYLRN

SEQ ID NO: 450 - protein, 166 aa, Homo sapiens
  IFNB_Q10D
MSYNLLGFLDRSSNFQCQKLLWQLNGRLEYCLKDRMNFDIPEEIKQLQQFQKEDAALTIYEMLQNIFAIFRQDSSSTGWNETIVENLLANVYHQINHLKTVLEEKLEKEDFTRGKLMSSLHLKRYYGRILHYLKAKEYSHCAWTIVRVEILRNFYFINRLTGYLRN

SEQ ID NO: 451 - protein, 166 aa, Homo sapiens
  IFNB_Q10E
MSYNLLGFLERSSNFQCQKLLWQLNGRLEYCLKDRMNFDIPEEIKQLQQFQKEDAALTIYEMLQNIFAIFRQDSSSTGWNETIVENLLANVYHQINHLKTVLEEKLEKEDFTRGKLMSSLHLKRYYGRILHYLKAKEYSHCAWTIVRVEILRNFYFINRLTGYLRN

SEQ ID NO: 452 - protein, 166 aa, Homo sapiens
  IFNB_Q10K
MSYNLLGFLKRSSNFQCQKLLWQLNGRLEYCLKDRMNFDIPEEIKQLQQFQKEDAALTIYEMLQNIFAIFRQDSSSTGWNETIVENLLANVYHQINHLKTVLEEKLEKEDFTRGKLMSSLHLKRYYGRILHYLKAKEYSHCAWTIVRVEILRNFYFINRLTGYLRN

SEQ ID NO: 453 - protein, 166 aa, Homo sapiens
  IFNB_Q10N
MSYNLLGFLNRSSNFQCQKLLWQLNGRLEYCLKDRMNFDIPEEIKQLQQFQKEDAALTIYEMLQNIFAIFRQDSSSTGWNETIVENLLANVYHQINHLKTVLEEKLEKEDFTRGKLMSSLHLKRYYGRILHYLKAKEYSHCAWTIVRVEILRNFYFINRLTGYLRN

SEQ ID NO: 454 - protein, 166 aa, Homo sapiens
  IFNB_Q10R
MSYNLLGFLRRSSNFQCQKLLWQLNGRLEYCLKDRMNFDIPEEIKQLQQFQKEDAALTIYEMLQNIFAIFRQDSSSTGWNETIVENLLANVYHQINHLKTVLEEKLEKEDFTRGKLMSSLHLKRYYGRILHYLKAKEYSHCAWTIVRVEILRNFYFINRLTGYLRN

SEQ ID NO: 455 - protein, 166 aa, Homo sapiens
  IFNB_Q10S
MSYNLLGFLSRSSNFQCQKLLWQLNGRLEYCLKDRMNFDIPEEIKQLQQFQKEDAALTIYEMLQNIFAIFRQDSSSTGWNETIVENLLANVYHQINHLKTVLEEKLEKEDFTRGKLMSSLHLKRYYGRILHYLKAKEYSHCAWTIVRVEILRNFYFINRLTGYLRN

SEQ ID NO: 456 - protein, 166 aa, Homo sapiens
  IFNB_Q10T
MSYNLLGFLTRSSNFQCQKLLWQLNGRLEYCLKDRMNFDIPEEIKQLQQFQKEDAALTIYEMLQNIFAIFRQDSSSTGWNETIVENLLANVYHQINHLKTVLEEKLEKEDFTRGKLMSSLHLKRYYGRILHYLKAKEYSHCAWTIVRVEILRNFYFINRLTGYLRN

SEQ ID NO: 457 - protein, 166 aa, Homo sapiens
  IFNB_S12D
MSYNLLGFLQRDSNFQCQKLLWQLNGRLEYCLKDRMNFDIPEEIKQLQQFQKEDAALTIYEMLQNIFAIFRQDSSSTGWNETIVENLLANVYHQINHLKTVLEEKLEKEDFTRGKLMSSLHLKRYYGRILHYLKAKEYSHCAWTIVRVEILRNFYFINRLTGYLRN

SEQ ID NO: 458 - protein, 166 aa, Homo sapiens
  IFNB_S12E
MSYNLLGFLQRESNFQCQKLLWQLNGRLEYCLKDRMNFDIPEEIKQLQQFQKEDAALTIYEMLQNIFAIFRQDSSSTGWNETIVENLLANVYHQINHLKTVLEEKLEKEDFTRGKLMSSLHLKRYYGRILHYLKAKEYSHCAWTIVRVEILRNFYFINRLTGYLRN

SEQ ID NO: 459 - protein, 166 aa, Homo sapiens
  IFNB_S12K
MSYNLLGFLQRKSNFQCQKLLWQLNGRLEYCLKDRMNFDIPEEIKQLQQFQKEDAALTIYEMLQNIFAIFRQDSSSTGWNETIVENLLANVYHQINHLKTVLEEKLEKEDFTRGKLMSSLHLKRYYGRILHYLKAKEYSHCAWTIVRVEILRNFYFINRLTGYLRN

SEQ ID NO: 460 - protein, 166 aa, Homo sapiens
  IFNB_S12R
MSYNLLGFLQRRSNFQCQKLLWQLNGRLEYCLKDRMNFDIPEEIKQLQQFQKEDAALTIYEMLQNIFAIFRQDSSSTGWNETIVENLLANVYHQINHLKTVLEEKLEKEDFTRGKLMSSLHLKRYYGRILHYLKAKEYSHCAWTIVRVEILRNFYFINRLTGYLRN

SEQ ID NO: 461 - protein, 166 aa, Homo sapiens
  IFNB_S13D
MSYNLLGFLQRSDNFQCQKLLWQLNGRLEYCLKDRMNFDIPEEIKQLQQFQKEDAALTIYEMLQNIFAIFRQDSSSTGWNETIVENLLANVYHQINHLKTVLEEKLEKEDFTRGKLMSSLHLKRYYGRILHYLKAKEYSHCAWTIVRVEILRNFYFINRLTGYLRN

SEQ ID NO: 462 - protein, 166 aa, Homo sapiens
  IFNB_S13E
MSYNLLGFLQRSENFQCQKLLWQLNGRLEYCLKDRMNFDIPEEIKQLQQFQKEDAALTIYEMLQNIFAIFRQDSSSTGWNETIVENLLANVYHQINHLKTVLEEKLEKEDFTRGKLMSSLHLKRYYGRILHYLKAKEYSHCAWTIVRVEILRNFYFINRLTGYLRN

SEQ ID NO: 463 - protein, 166 aa, Homo sapiens
  IFNB_S13K
MSYNLLGFLQRSKNFQCQKLLWQLNGRLEYCLKDRMNFDIPEEIKQLQQFQKEDAALTIYEMLQNIFAIFRQDSSSTGWNETIVENLLANVYHQINHLKTVLEEKLEKEDFTRGKLMSSLHLKRYYGRILHYLKAKEYSHCAWTIVRVEILRNFYFINRLTGYLRN

SEQ ID NO: 464 - protein, 166 aa, Homo sapiens
  IFNB_S13N
MSYNLLGFLQRSNNFQCQKLLWQLNGRLEYCLKDRMNFDIPEEIKQLQQFQKEDAALTIYEMLQNIFAIFRQDSSSTGWNETIVENLLANVYHQINHLKTVLEEKLEKEDFTRGKLMSSLHLKRYYGRILHYLKAKEYSHCAWTIVRVEILRNFYFINRLTGYLRN

SEQ ID NO: 465 - protein, 166 aa, Homo sapiens
  IFNB_S13Q
MSYNLLGFLQRSQNFQCQKLLWQLNGRLEYCLKDRMNFDIPEEIKQLQQFQKEDAALTIYEMLQNIFAIFRQDSSSTGWNETIVENLLANVYHQINHLKTVLEEKLEKEDFTRGKLMSSLHLKRYYGRILHYLKAKEYSHCAWTIVRVEILRNFYFINRLTGYLRN

SEQ ID NO: 466 - protein, 166 aa, Homo sapiens [sequence omitted]

SEQ ID NO: 467 - protein, 166 aa, Homo sapiens
  IFNB_S13T
MSYNLLGFLQRSTNFQCQKLLWQLNGRLEYCLKDRMNFDIPEEIKQLQQFQKEDAALTIYEMLQNIFAIFRQDSSSTGWNETIVENLLANVYHQINHLKTVLEEKLEKEDFTRGKLMSSLHLKRYYGRILHYLKAKEYSHCAWTIVRVEILRNFYFINRLTGYLRN

SEQ ID NO: 468 - protein, 166 aa, Homo sapiens
  IFNB_N14D
MSYNLLGFLQRSSDFQCQKLLWQLNGRLEYCLKDRMNFDIPEEIKQLQQFQKEDAALTIYEMLQNIFAIFRQDSSSTGWNETIVENLLANVYHQINHLKTVLEEKLEKEDFTRGKLMSSLHLKRYYGRILHYLKAKEYSHCAWTIVRVEILRNFYFINRLTGYLRN

SEQ ID NO: 469 - protein, 166 aa, Homo sapiens
  IFNB_N14E
MSYNLLGFLQRSSEFQCQKLLWQLNGRLEYCLKDRMNFDIPEEIKQLQQFQKEDAALTIYEMLQNIFAIFRQDSSSTGWNETIVENLLANVYHQINHLKTVLEEKLEKEDFTRGKLMSSLHLKRYYGRILHYLKAKEYSHCAWTIVRVEILRNFYFINRLTGYLRN

SEQ ID NO: 470 - protein, 166 aa, Homo sapiens
  IFNB_N14K
MSYNLLGFLQRSSKFQCQKLLWQLNGRLEYCLKDRMNFDIPEEIKQLQQFQKEDAALTIYEMLQNIFAIFRQDSSSTGWNETIVENLLANVYHQINHLKTVLEEKLEKEDFTRGKLMSSLHLKRYYGRILHYLKAKEYSHCAWTIVRVEILRNFYFINRLTGYLRN

SEQ ID NO: 471 - protein, 166 aa, Homo sapiens
  IFNB_N14Q
MSYNLLGFLQRSSQFQCQKLLWQLNGRLEYCLKDRMNFDIPEEIKQLQQFQKEDAALTIYEMLQNIFAIFRQDSSSTGWNETIVENLLANVYHQINHLKTVLEEKLEKEDFTRGKLMSSLHLKRYYGRILHYLKAKEYSHCAWTIVRVEILRNFYFINRLTGYLRN

SEQ ID NO: 472 - protein, 166 aa, Homo sapiens
  IFNB_N14R
MSYNLLGFLQRSSRFQCQKLLWQLNGRLEYCLKDRMNFDIPEEIKQLQQFQKEDAALTIYEMLQNIFAIFRQDSSSTGWNETIVENLLANVYHQINHLKTVLEEKLEKEDFTRGKLMSSLHLKRYYGRILHYLKAKEYSHCAWTIVRVEILRNFYFINRLTGYLRN

SEQ ID NO: 473 - protein, 166 aa, Homo sapiens
  IFNB_N14S
MSYNLLGFLQRSSSFQCQKLLWQLNGRLEYCLKDRMNFDIPEEIKQLQQFQKEDAALTIYEMLQNIFAIFRQDSSSTGWNETIVENLLANVYHQINHLKTVLEEKLEKEDFTRGKLMSSLHLKRYYGRILHYLKAKEYSHCAWTIVRVEILRNFYFINRLTGYLRN

SEQ ID NO: 474 - protein, 166 aa, Homo sapiens
  IFNB_N14T
MSYNLLGFLQRSSTFQCQKLLWQLNGRLEYCLKDRMNFDIPEEIKQLQQFQKEDAALTIYEMLQNIFAIFRQDSSSTGWNETIVENLLANVYHQINHLKTVLEEKLEKEDFTRGKLMSSLHLKRYYGRILHYLKAKEYSHCAWTIVRVEILRNFYFINRLTGYLRN

SEQ ID NO: 475 - protein, 166 aa, Homo sapiens
  IFNB_F15D
MSYNLLGFLQRSSNDQCQKLLWQLNGRLEYCLKDRMNFDIPEEIKQLQQFQKEDAALTIYEMLQNIFAIFRQDSSSTGWNETIVENLLANVYHQINHLKTVLEEKLEKEDFTRGKLMSSLHLKRYYGRILHYLKAKEYSHCAWTIVRVEILRNFYFINRLTGYLRN

SEQ ID NO: 476 - protein, 166 aa, Homo sapiens
  IFNB_F15E
MSYNLLGFLQRSSNEQCQKLLWQLNGRLEYCLKDRMNFDIPEEIKQLQQFQKEDAALTIYEMLQNIFAIFRQDSSSTGWNETIVENLLANVYHQINHLKTVLEEKLEKEDFTRGKLMSSLHLKRYYGRILHYLKAKEYSHCAWTIVRVEILRNFYFINRLTGYLRN

SEQ ID NO: 477 - protein, 166 aa, Homo sapiens
  IFNB_F15K
MSYNLLGFLQRSSNKQCQKLLWQLNGRLEYCLKDRMNFDIPEEIKQLQQFQKEDAALTIYEMLQNIFAIFRQDSSSTGWNETIVENLLANVYHQINHLKTVLEEKLEKEDFTRGKLMSSLHLKRYYGRILHYLKAKEYSHCAWTIVRVEILRNFYFINRLTGYLRN

SEQ ID NO: 478 - protein, 166 aa, Homo sapiens
  IFNB_F15R
MSYNLLGFLQRSSNRQCQKLLWQLNGRLEYCLKDRMNFDIPEEIKQLQQFQKEDAALTIYEMLQNIFAIFRQDSSSTGWNETIVENLLANVYHQINHLKTVLEEKLEKEDFTRGKLMSSLHLKRYYGRILHYLKAKEYSHCAWTIVRVEILRNFYFINRLTGYLRN

SEQ ID NO: 479 - protein, 166 aa, Homo sapiens
  IFNB_Q16D
MSYNLLGFLQRSSNFDCQKLLWQLNGRLEYCLKDRMNFDIPEEIKQLQQFQKEDAALTIYEMLQNIFAIFRQDSSSTGWNETIVENLLANVYHQINHLKTVLEEKLEKEDFTRGKLMSSLHLKRYYGRILHYLKAKEYSHCAWTIVRVEILRNFYFINRLTGYLRN

SEQ ID NO: 480 - protein, 166 aa, Homo sapiens
  IFNB_Q16E
MSYNLLGFLQRSSNFECQKLLWQLNGRLEYCLKDRMNFDIPEEIKQLQQFQKEDAALTIYEMLQNIFAIFRQDSSSTGWNETIVENLLANVYHQINHLKTVLEEKLEKEDFTRGKLMSSLHLKRYYGRILHYLKAKEYSHCAWTIVRVEILRNFYFINRLTGYLRN

SEQ ID NO: 481 - protein, 166 aa, Homo sapiens
  IFNB_Q16K
MSYNLLGFLQRSSNFKCQKLLWQLNGRLEYCLKDRMNFDIPEEIKQLQQFQKEDAALTIYEMLQNIFAIFRQDSSSTGWNETIVENLLANVYHQINHLKTVLEEKLEKEDFTRGKLMSSLHLKRYYGRILHYLKAKEYSHCAWTIVRVEILRNFYFINRLTGYLRN

SEQ ID NO: 482 - protein, 166 aa, Homo sapiens
  IFNB_Q16N
MSYNLLGFLQRSSNFNCQKLLWQLNGRLEYCLKDRMNFDIPEEIKQLQQFQKEDAALTIYEMLQNIFAIFRQDSSSTGWNETIVENLLANVYHQINHLKTVLEEKLEKEDFTRGKLMSSLHLKRYYGRILHYLKAKEYSHCAWTIVRVEILRNFYFINRLTGYLRN

SEQ ID NO: 483 - protein, 166 aa, Homo sapiens
  IFNB_Q16R
MSYNLLGFLQRSSNFRCQKLLWQLNGRLEYCLKDRMNFDIPEEIKQLQQFQKEDAALTIYEMLQNIFAIFRQDSSSTGWNETIVENLLANVYHQINHLKTVLEEKLEKEDFTRGKLMSSLHLKRYYGRILHYLKAKEYSHCAWTIVRVEILRNFYFINRLTGYLRN

SEQ ID NO: 484 - protein, 166 aa, Homo sapiens
  IFNB_Q16S
MSYNLLGFLQRSSNFSCQKLLWQLNGRLEYCLKDRMNFDIPEEIKQLQQFQKEDAALTIYEMLQNIFAIFRQDSSSTGWNETIVENLLANVYHQINHLKTVLEEKLEKEDFTRGKLMSSLHLKRYYGRILHYLKAKEYSHCAWTIVRVEILRNFYFINRLTGYLRN

SEQ ID NO: 485 - protein, 166 aa, Homo sapiens
  IFNB_Q16T
MSYNLLGFLQRSSNFTCQKLLWQLNGRLEYCLKDRMNFDIPEEIKQLQQFQKEDAALTIYEMLQNIFAIFRQDSSSTGWNETIVENLLANVYHQINHLKTVLEEKLEKEDFTRGKLMSSLHLKRYYGRILHYLKAKEYSHCAWTIVRVEILRNFYFINRLTGYLRN

SEQ ID NO: 486 - protein, 166 aa, Homo sapiens
  IFNB_C17D
MSYNLLGFLQRSSNFQDQKLLWQLNGRLEYCLKDRMNFDIPEEIKQLQQFQKEDAALTIYEMLQNIFAIFRQDSSSTGWNETIVENLLANVYHQINHLKTVLEEKLEKEDFTRGKLMSSLHLKRYYGRILHYLKAKEYSHCAWTIVRVEILRNFYFINRLTGYLRN

SEQ ID NO: 487 - protein, 166 aa, Homo sapiens
  IFNB_C17E
MSYNLLGFLQRSSNFQEQKLLWQLNGRLEYCLKDRMNFDIPEEIKQLQQFQKEDAALTIYEMLQNIFAIFRQDSSSTGWNETIVENLLANVYHQINHLKTVLEEKLEKEDFTRGKLMSSLHLKRYYGRILHYLKAKEYSHCAWTIVRVEILRNFYFINRLTGYLRN

SEQ ID NO: 488 - protein, 166 aa, Homo sapiens
  IFNB_C17K
MSYNLLGFLQRSSNFQKQKLLWQLNGRLEYCLKDRMNFDIPEEIKQLQQFQKEDAALTIYEMLQNIFAIFRQDSSSTGWNETIVENLLANVYHQINHLKTVLEEKLEKEDFTRGKLMSSLHLKRYYGRILHYLKAKEYSHCAWTIVRVEILRNFYFINRLTGYLRN

SEQ ID NO: 489 - protein, 166 aa, Homo sapiens
  IFNB_C17N
MSYNLLGFLQRSSNFQNQKLLWQLNGRLEYCLKDRMNFDIPEEIKQLQQFQKEDAALTIYEMLQNIFAIFRQDSSSTGWNETIVENLLANVYHQINHLKTVLEEKLEKEDFTRGKLMSSLHLKRYYGRILHYLKAKEYSHCAWTIVRVEILRNFYFINRLTGYLRN

SEQ ID NO: 490 - protein, 166 aa, Homo sapiens
  IFNB_C17Q
MSYNLLGFLQRSSNFQQQKLLWQLNGRLEYCLKDRMNFDIPEEIKQLQQFQKEDAALTIYEMLQNIFAIFRQDSSSTGWNETIVENLLANVYHQINHLKTVLEEKLEKEDFTRGKLMSSLHLKRYYGRILHYLKAKEYSHCAWTIVRVEILRNFYFINRLTGYLRN

SEQ ID NO: 491 - protein, 166 aa, Homo sapiens
  IFNB_C17R
MSYNLLGFLQRSSNFQRQKLLWQLNGRLEYCLKDRMNFDIPEEIKQLQQFQKEDAALTIYEMLQNIFAIFRQDSSSTGWNETIVENLLANVYHQINHLKTVLEEKLEKEDFTRGKLMSSLHLKRYYGRILHYLKAKEYSHCAWTIVRVEILRNFYFINRLTGYLRN

SEQ ID NO: 492 - protein, 166 aa, Homo sapiens
  IFNB_C17S
MSYNLLGFLQRSSNFQSQKLLWQLNGRLEYCLKDRMNFDIPEEIKQLQQFQKEDAALTIYEMLQNIFAIFRQDSSSTGWNETIVENLLANVYHQINHLKTVLEEKLEKEDFTRGKLMSSLHLKRYYGRILHYLKAKEYSHCAWTIVRVEILRNFYFINRLTGYLRN

SEQ ID NO: 493 - protein, 166 aa, Homo sapiens
  IFNB_C17T
MSYNLLGFLQRSSNFQTQKLLWQLNGRLEYCLKDRMNFDIPEEIKQLQQFQKEDAALTIYEMLQNIFAIFRQDSSSTGWNETIVENLLANVYHQINHLKTVLEEKLEKEDFTRGKLMSSLHLKRYYGRILHYLKAKEYSHCAWTIVRVEILRNFYFINRLTGYLRN

SEQ ID NO: 494 - protein, 166 aa, Homo sapiens
  IFNB_L20N
MSYNLLGFLQRSSNFQCQKNLWQLNGRLEYCLKDRMNFDIPEEIKQLQQFQKEDAALTIYEMLQNIFAIFRQDSSSTGWNETIVENLLANVYHQINHLKTVLEEKLEKEDFTRGKLMSSLHLKRYYGRILHYLKAKEYSHCAWTIVRVEILRNFYFINRLTGYLRN

SEQ ID NO: 495 - protein, 166 aa, Homo sapiens
  IFNB_L20Q
MSYNLLGFLQRSSNFQCQKQLWQLNGRLEYCLKDRMNFDIPEEIKQLQQFQKEDAALTIYEMLQNIFAIFRQDSSSTGWNETIVENLLANVYHQINHLKTVLEEKLEKEDFTRGKLMSSLHLKRYYGRILHYLKAKEYSHCAWTIVRVEILRNFYFINRLTGYLRN

SEQ ID NO: 496 - protein, 166 aa, Homo sapiens
  IFNB_L20R
MSYNLLGFLQRSSNFQCQKRLWQLNGRLEYCLKDRMNFDIPEEIKQLQQFQKEDAALTIYEMLQNIFAIFRQDSSSTGWNETIVENLLANVYHQINHLKTVLEEKLEKEDFTRGKLMSSLHLKRYYGRILHYLKAKEYSHCAWTIVRVEILRNFYFINRLTGYLRN

SEQ ID NO: 497 - protein, 166 aa, Homo sapiens
  IFNB_L20S
MSYNLLGFLQRSSNFQCQKSLWQLNGRLEYCLKDRMNFDIPEEIKQLQQFQKEDAALTIYEMLQNIFAIFRQDSSSTGWNETIVENLLANVYHQINHLKTVLEEKLEKEDFTRGKLMSSLHLKRYYGRILHYLKAKEYSHCAWTIVRVEILRNFYFINRLTGYLRN

SEQ ID NO: 498 - protein, 166 aa, Homo sapiens
  IFNB_L20T
MSYNLLGFLQRSSNFQCQKTLWQLNGRLEYCLKDRMNFDIPEEIKQLQQFQKEDAALTIYEMLQNIFAIFRQDSSSTGWNETIVENLLANVYHQINHLKTVLEEKLEKEDFTRGKLMSSLHLKRYYGRILHYLKAKEYSHCAWTIVRVEILRNFYFINRLTGYLRN

SEQ ID NO: 499 - protein, 166 aa, Homo sapiens
  IFNB_L20D
MSYNLLGFLQRSSNFQCQKDLWQLNGRLEYCLKDRMNFDIPEEIKQLQQFQKEDAALTIYEMLQNIFAIFRQDSSSTGWNETIVENLLANVYHQINHLKTVLEEKLEKEDFTRGKLMSSLHLKRYYGRILHYLKAKEYSHCAWTIVRVEILRNFYFINRLTGYLRN

SEQ ID NO: 500 - protein, 166 aa, Homo sapiens
  IFNB_L20E
MSYNLLGFLQRSSNFQCQKELWQLNGRLEYCLKDRMNFDIPEEIKQLQQFQKEDAALTIYEMLQNIFAIFRQDSSSTGWNETIVENLLANVYHQINHLKTVLEEKLEKEDFTRGKLMSSLHLKRYYGRILHYLKAKEYSHCAWTIVRVEILRNFYFINRLTGYLRN

SEQ ID NO: 501 - protein, 166 aa, Homo sapiens
  IFNB_L20K
MSYNLLGFLQRSSNFQCQKKLWQLNGRLEYCLKDRMNFDIPEEIKQLQQFQKEDAALTIYEMLQNIFAIFRQDSSSTGWNETIVENLLANVYHQINHLKTVLEEKLEKEDFTRGKLMSSLHLKRYYGRILHYLKAKEYSHCAWTIVRVEILRNFYFINRLTGYLRN

SEQ ID NO: 502 - protein, 166 aa, Homo sapiens
  IFNB_W22D
MSYNLLGFLQRSSNFQCQKLLDQLNGRLEYCLKDRMNFDIPEEIKQLQQFQKEDAALTIYEMLQNIFAIFRQDSSSTGWNETIVENLLANVYHQINHLKTVLEEKLEKEDFTRGKLMSSLHLKRYYGRILHYLKAKEYSHCAWTIVRVEILRNFYFINRLTGYLRN

SEQ ID NO: 503 - protein, 166 aa, Homo sapiens
  IFNB_W22E
MSYNLLGFLQRSSNFQCQKLLEQLNGRLEYCLKDRMNFDIPEEIKQLQQFQKEDAALTIYEMLQNIFAIFRQDSSSTGWNETIVENLLANVYHQINHLKTVLEEKLEKEDFTRGKLMSSLHLKRYYGRILHYLKAKEYSHCAWTIVRVEILRNFYFINRLTGYLRN

SEQ ID NO: 504 - protein, 166 aa, Homo sapiens
  IFNB_W22K
MSYNLLGFLQRSSNFQCQKLLKQLNGRLEYCLKDRMNFDIPEEIKQLQQFQKEDAALTIYEMLQNIFAIFRQDSSSTGWNETIVENLLANVYHQINHLKTVLEEKLEKEDFTRGKLMSSLHLKRYYGRILHYLKAKEYSHCAWTIVRVEILRNFYFINRLTGYLRN

SEQ ID NO: 505 - protein, 166 aa, Homo sapiens
  IFNB_W22R
MSYNLLGFLQRSSNFQCQKLLRQLNGRLEYCLKDRMNFDIPEEIKQLQQFQKEDAALTIYEMLQNIFAIFRQDSSSTGWNETIVENLLANVYHQINHLKTVLEEKLEKEDFTRGKLMSSLHLKRYYGRILHYLKAKEYSHCAWTIVRVEILRNFYFINRLTGYLRN

SEQ ID NO: 506 - protein, 166 aa, Homo sapiens
  IFNB_Q23D
MSYNLLGFLQRSSNFQCQKLLWDLNGRLEYCLKDRMNFDIPEEIKQLQQFQKEDAALTIYEMLQNIFAIFRQDSSSTGWNETIVENLLANVYHQINHLKTVLEEKLEKEDFTRGKLMSSLHLKRYYGRILHYLKAKEYSHCAWTIVRVEILRNFYFINRLTGYLRN

SEQ ID NO: 507 - protein, 166 aa, Homo sapiens
  IFNB_Q23E
MSYNLLGFLQRSSNFQCQKLLWELNGRLEYCLKDRMNFDIPEEIKQLQQFQKEDAALTIYEMLQNIFAIFRQDSSSTGWNETIVENLLANVYHQINHLKTVLEEKLEKEDFTRGKLMSSLHLKRYYGRILHYLKAKEYSHCAWTIVRVEILRNFYFINRLTGYLRN

SEQ ID NO: 508 - protein, 166 aa, Homo sapiens
  IFNB_Q23K
MSYNLLGFLQRSSNFQCQKLLWKLNGRLEYCLKDRMNFDIPEEIKQLQQFQKEDAALTIYEMLQNIFAIFRQDSSSTGWNETIVENLLANVYHQINHLKTVLEEKLEKEDFTRGKLMSSLHLKRYYGRILHYLKAKEYSHCAWTIVRVEILRNFYFINRLTGYLRN

SEQ ID NO: 509 - protein, 166 aa, Homo sapiens
  IFNB_Q23R
MSYNLLGFLQRSSNFQCQKLLWRLNGRLEYCLKDRMNFDIPEEIKQLQQFQKEDAALTIYEMLQNIFAIFRQDSSSTGWNETIVENLLANVYHQINHLKTVLEEKLEKEDFTRGKLMSSLHLKRYYGRILHYLKAKEYSHCAWTIVRVEILRNFYFINRLTGYLRN

SEQ ID NO: 510 - protein, 166 aa, Homo sapiens
  IFNB_L24D
MSYNLLGFLQRSSNFQCQKLLWQDNGRLEYCLKDRMNFDIPEEIKQLQQFQKEDAALTIYEMLQNIFAIFRQDSSSTGWNETIVENLLANVYHQINHLKTVLEEKLEKEDFTRGKLMSSLHLKRYYGRILHYLKAKEYSHCAWTIVRVEILRNFYFINRLTGYLRN

SEQ ID NO: 511 - protein, 166 aa, Homo sapiens
  IFNB_L24E
MSYNLLGFLQRSSNFQCQKLLWQENGRLEYCLKDRMNFDIPEEIKQLQQFQKEDAALTIYEMLQNIFAIFRQDSSSTGWNETIVENLLANVYHQINHLKTVLEEKLEKEDFTRGKLMSSLHLKRYYGRILHYLKAKEYSHCAWTIVRVEILRNFYFINRLTGYLRN

SEQ ID NO: 512 - protein, 166 aa, Homo sapiens
  IFNB_L24K
MSYNLLGFLQRSSNFQCQKLLWQKNGRLEYCLKDRMNFDIPEEIKQLQQFQKEDAALTIYEMLQNIFAIFRQDSSSTGWNETIVENLLANVYHQINHLKTVLEEKLEKEDFTRGKLMSSLHLKRYYGRILHYLKAKEYSHCAWTIVRVEILRNFYFINRLTGYLRN

SEQ ID NO: 513 - protein, 166 aa, Homo sapiens
  IFNB_L24R
MSYNLLGFLQRSSNFQCQKLLWQRNGRLEYCLKDRMNFDIPEEIKQLQQFQKEDAALTIYEMLQNIFAIFRQDSSSTGWNETIVENLLANVYHQINHLKTVLEEKLEKEDFTRGKLMSSLHLKRYYGRILHYLKAKEYSHCAWTIVRVEILRNFYFINRLTGYLRN

SEQ ID NO: 514 - protein, 166 aa, Homo sapiens
  IFNB_G78D
MSYNLLGFLQRSSNFQCQKLLWQLNGRLEYCLKDRMNFDIPEEIKQLQQFQKEDAALTIYEMLQNIFAIFRQDSSSTDWNETIVENLLANVYHQINHLKTVLEEKLEKEDFTRGKLMSSLHLKRYYGRILHYLKAKEYSHCAWTIVRVEILRNFYFINRLTGYLRN

SEQ ID NO: 515 - protein, 166 aa, Homo sapiens
  IFNB_G78E
MSYNLLGFLQRSSNFQCQKLLWQLNGRLEYCLKDRMNFDIPEEIKQLQQFQKEDAALTIYEMLQNIFAIFRQDSSSTEWNETIVENLLANVYHQINHLKTVLEEKLEKEDFTRGKLMSSLHLKRYYGRILHYLKAKEYSHCAWTIVRVEILRNFYFINRLTGYLRN

SEQ ID NO: 516 - protein, 166 aa, Homo sapiens
  IFNB_G78K
MSYNLLGFLQRSSNFQCQKLLWQLNGRLEYCLKDRMNFDIPEEIKQLQQFQKEDAALTIYEMLQNIFAIFRQDSSSTKWNETIVENLLANVYHQINHLKTVLEEKLEKEDFTRGKLMSSLHLKRYYGRILHYLKAKEYSHCAWTIVRVEILRNFYFINRLTGYLRN

SEQ ID NO: 517 - protein, 166 aa, Homo sapiens
  IFNB_G78R
MSYNLLGFLQRSSNFQCQKLLWQLNGRLEYCLKDRMNFDIPEEIKQLQQFQKEDAALTIYEMLQNIFAIFRQDSSSTRWNETIVENLLANVYHQINHLKTVLEEKLEKEDFTRGKLMSSLHLKRYYGRILHYLKAKEYSHCAWTIVRVEILRNFYFINRLTGYLRN

SEQ ID NO: 518 - protein, 166 aa, Homo sapiens
  IFNB_W79D
MSYNLLGFLQRSSNFQCQKLLWQLNGRLEYCLKDRMNFDIPEEIKQLQQFQKEDAALTIYEMLQNIFAIFRQDSSSTGDNETIVENLLANVYHQINHLKTVLEEKLEKEDFTRGKLMSSLHLKRYYGRILHYLKAKEYSHCAWTIVRVEILRNFYFINRLTGYLRN

SEQ ID NO: 519 - protein, 166 aa, Homo sapiens
  IFNB_W79E
MSYNLLGFLQRSSNFQCQKLLWQLNGRLEYCLKDRMNFDIPEEIKQLQQFQKEDAALTIYEMLQNIFAIFRQDSSSTGENETIVENLLANVYHQINHLKTVLEEKLEKEDFTRGKLMSSLHLKRYYGRILHYLKAKEYSHCAWTIVRVEILRNFYFINRLTGYLRN

SEQ ID NO: 520 - protein, 166 aa, Homo sapiens
  IFNB_W79K
MSYNLLGFLQRSSNFQCQKLLWQLNGRLEYCLKDRMNFDIPEEIKQLQQFQKEDAALTIYEMLQNIFAIFRQDSSSTGKNETIVENLLANVYHQINHLKTVLEEKLEKEDFTRGKLMSSLHLKRYYGRILHYLKAKEYSHCAWTIVRVEILRNFYFINRLTGYLRN

SEQ ID NO: 521 - protein, 166 aa, Homo sapiens
  IFNB_W79R
MSYNLLGFLQRSSNFQCQKLLWQLNGRLEYCLKDRMNFDIPEEIKQLQQFQKEDAALTIYEMLQNIFAIFRQDSSSTGRNETIVENLLANVYHQINHLKTVLEEKLEKEDFTRGKLMSSLHLKRYYGRILHYLKAKEYSHCAWTIVRVEILRNFYFINRLTGYLRN

SEQ ID NO: 522 - protein, 166 aa, Homo sapiens
  IFNB_N80D
MSYNLLGFLQRSSNFQCQKLLWQLNGRLEYCLKDRMNFDIPEEIKQLQQFQKEDAALTIYEMLQNIFAIFRQDSSSTGWDETIVENLLANVYHQINHLKTVLEEKLEKEDFTRGKLMSSLHLKRYYGRILHYLKAKEYSHCAWTIVRVEILRNFYFINRLTGYLRN

SEQ ID NO: 523 - protein, 166 aa, Homo sapiens
  IFNB_N80E
MSYNLLGFLQRSSNFQCQKLLWQLNGRLEYCLKDRMNFDIPEEIKQLQQFQKEDAALTIYEMLQNIFAIFRQDSSSTGWEETIVENLLANVYHQINHLKTVLEEKLEKEDFTRGKLMSSLHLKRYYGRILHYLKAKEYSHCAWTIVRVEILRNFYFINRLTGYLRN

SEQ ID NO: 524 - protein, 166 aa, Homo sapiens
  IFNB_N80K
MSYNLLGFLQRSSNFQCQKLLWQLNGRLEYCLKDRMNFDIPEEIKQLQQFQKEDAALTIYEMLQNIFAIFRQDSSSTGWKETIVENLLANVYHQINHLKTVLEEKLEKEDFTRGKLMSSLHLKRYYGRILHYLKAKEYSHCAWTIVRVEILRNFYFINRLTGYLRN

SEQ ID NO: 525 - protein, 166 aa, Homo sapiens
  IFNB_N80R
MSYNLLGFLQRSSNFQCQKLLWQLNGRLEYCLKDRMNFDIPEEIKQLQQFQKEDAALTIYEMLQNIFAIFRQDSSSTGWRETIVENLLANVYHQINHLKTVLEEKLEKEDFTRGKLMSSLHLKRYYGRILHYLKAKEYSHCAWTIVRVEILRNFYFINRLTGYLRN

SEQ ID NO: 526 - protein, 166 aa, Homo sapiens
  IFNB_T82D
MSYNLLGFLQRSSNFQCQKLLWQLNGRLEYCLKDRMNFDIPEEIKQLQQFQKEDAALTIYEMLQNIFAIFRQDSSSTGWNEDIVENLLANVYHQINHLKTVLEEKLEKEDFTRGKLMSSLHLKRYYGRILHYLKAKEYSHCAWTIVRVEILRNFYFINRLTGYLRN

SEQ ID NO: 527 - protein, 166 aa, Homo sapiens
  IFNB_T82E
MSYNLLGFLQRSSNFQCQKLLWQLNGRLEYCLKDRMNFDIPEEIKQLQQFQKEDAALTIYEMLQNIFAIFRQDSSSTGWNEEIVENLLANVYHQINHLKTVLEEKLEKEDFTRGKLMSSLHLKRYYGRILHYLKAKEYSHCAWTIVRVEILRNFYFINRLTGYLRN

SEQ ID NO: 528 - protein, 166 aa, Homo sapiens
  IFNB_T82K
MSYNLLGFLQRSSNFQCQKLLWQLNGRLEYCLKDRMNFDIPEEIKQLQQFQKEDAALTIYEMLQNIFAIFRQDSSSTGWNEKIVENLLANVYHQINHLKTVLEEKLEKEDFTRGKLMSSLHLKRYYGRILHYLKAKEYSHCAWTIVRVEILRNFYFINRLTGYLRN

SEQ ID NO: 529 - protein, 166 aa, Homo sapiens
  IFNB_T82R
MSYNLLGFLQRSSNFQCQKLLWQLNGRLEYCLKDRMNFDIPEEIKQLQQFQKEDAALTIYEMLQNIFAIFRQDSSSTGWNERIVENLLANVYHQINHLKTVLEEKLEKEDFTRGKLMSSLHLKRYYGRILHYLKAKEYSHCAWTIVRVEILRNFYFINRLTGYLRN

SEQ ID NO: 530 - protein, 166 aa, Homo sapiens
  IFNB_I83D
MSYNLLGFLQRSSNFQCQKLLWQLNGRLEYCLKDRMNFDIPEEIKQLQQFQKEDAALTIYEMLQNIFAIFRQDSSSTGWNETDVENLLANVYHQINHLKTVLEEKLEKEDFTRGKLMSSLHLKRYYGRILHYLKAKEYSHCAWTIVRVEILRNFYFINRLTGYLRN

SEQ ID NO: 531 - protein, 166 aa, Homo sapiens
  IFNB_I83E
MSYNLLGFLQRSSNFQCQKLLWQLNGRLEYCLKDRMNFDIPEEIKQLQQFQKEDAALTIYEMLQNIFAIFRQDSSSTGWNETEVENLLANVYHQINHLKTVLEEKLEKEDFTRGKLMSSLHLKRYYGRILHYLKAKEYSHCAWTIVRVEILRNFYFINRLTGYLRN

SEQ ID NO: 532 - protein, 166 aa, Homo sapiens
  IFNB_I83K
MSYNLLGFLQRSSNFQCQKLLWQLNGRLEYCLKDRMNFDIPEEIKQLQQFQKEDAALTIYEMLQNIFAIFRQDSSSTGWNETKVENLLANVYHQINHLKTVLEEKLEKEDFTRGKLMSSLHLKRYYGRILHYLKAKEYSHCAWTIVRVEILRNFYFINRLTGYLRN

SEQ ID NO: 533 - protein, 166 aa, Homo sapiens
  IFNB_I83R
MSYNLLGFLQRSSNFQCQKLLWQLNGRLEYCLKDRMNFDIPEEIKQLQQFQKEDAALTIYEMLQNIFAIFRQDSSSTGWNETRVENLLANVYHQINHLKTVLEEKLEKEDFTRGKLMSSLHLKRYYGRILHYLKAKEYSHCAWTIVRVEILRNFYFINRLTGYLRN

SEQ ID NO: 534 - protein, 166 aa, Homo sapiens
  IFNB_I83N
MSYNLLGFLQRSSNFQCQKLLWQLNGRLEYCLKDRMNFDIPEEIKQLQQFQKEDAALTIYEMLQNIFAIFRQDSSSTGWNETNVENLLANVYHQINHLKTVLEEKLEKEDFTRGKLMSSLHLKRYYGRILHYLKAKEYSHCAWTIVRVEILRNFYFINRLTGYLRN

SEQ ID NO: 535 - protein, 166 aa, Homo sapiens
  IFNB_I83Q
MSYNLLGFLQRSSNFQCQKLLWQLNGRLEYCLKDRMNFDIPEEIKQLQQFQKEDAALTIYEMLQNIFAIFRQDSSSTGWNETQVENLLANVYHQINHLKTVLEEKLEKEDFTRGKLMSSLHLKRYYGRILHYLKAKEYSHCAWTIVRVEILRNFYFINRLTGYLRN

SEQ ID NO: 536 - protein, 166 aa, Homo sapiens
  IFNB_I83S
MSYNLLGFLQRSSNFQCQKLLWQLNGRLEYCLKDRMNFDIPEEIKQLQQFQKEDAALTIYEMLQNIFAIFRQDSSSTGWNETSVENLLANVYHQINHLKTVLEEKLEKEDFTRGKLMSSLHLKRYYGRILHYLKAKEYSHCAWTIVRVEILRNFYFINRLTGYLRN

SEQ ID NO: 537 - protein, 166 aa, Homo sapiens
  IFNB_I83T
MSYNLLGFLQRSSNFQCQKLLWQLNGRLEYCLKDRMNFDIPEEIKQLQQFQKEDAALTIYEMLQNIFAIFRQDSSSTGWNETTVENLLANVYHQINHLKTVLEEKLEKEDFTRGKLMSSLHLKRYYGRILHYLKAKEYSHCAWTIVRVEILRNFYFINRLTGYLRN

SEQ ID NO: 538 - protein, 166 aa, Homo sapiens
  IFNB_N86D
MSYNLLGFLQRSSNFQCQKLLWQLNGRLEYCLKDRMNFDIPEEIKQLQQFQKEDAALTIYEMLQNIFAIFRQDSSSTGWNETIVEDLLANVYHQINHLKTVLEEKLEKEDFTRGKLMSSLHLKRYYGRILHYLKAKEYSHCAWTIVRVEILRNFYFINRLTGYLRN

SEQ ID NO: 539 - protein, 166 aa, Homo sapiens
  IFNB_N86E
MSYNLLGFLQRSSNFQCQKLLWQLNGRLEYCLKDRMNFDIPEEIKQLQQFQKEDAALTIYEMLQNIFAIFRQDSSSTGWNETIVEELLANVYHQINHLKTVLEEKLEKEDFTRGKLMSSLHLKRYYGRILHYLKAKEYSHCAWTIVRVEILRNFYFINRLTGYLRN

SEQ ID NO: 540 - protein, 166 aa, Homo sapiens
  IFNB_N86K
MSYNLLGFLQRSSNFQCQKLLWQLNGRLEYCLKDRMNFDIPEEIKQLQQFQKEDAALTIYEMLQNIFAIFRQDSSSTGWNETIVEKLLANVYHQINHLKTVLEEKLEKEDFTRGKLMSSLHLKRYYGRILHYLKAKEYSHCAWTIVRVEILRNFYFINRLTGYLRN

SEQ ID NO: 541 - protein, 166 aa, Homo sapiens
  IFNB_N86R
MSYNLLGFLQRSSNFQCQKLLWQLNGRLEYCLKDRMNFDIPEEIKQLQQFQKEDAALTIYEMLQNIFAIFRQDSSSTGWNETIVERLLANVYHQINHLKTVLEEKLEKEDFTRGKLMSSLHLKRYYGRILHYLKAKEYSHCAWTIVRVEILRNFYFINRLTGYLRN

SEQ ID NO: 542 - protein, 166 aa, Homo sapiens
  IFNB_N86Q
MSYNLLGFLQRSSNFQCQKLLWQLNGRLEYCLKDRMNFDIPEEIKQLQQFQKEDAALTIYEMLQNIFAIFRQDSSSTGWNETIVEQLLANVYHQINHLKTVLEEKLEKEDFTRGKLMSSLHLKRYYGRILHYLKAKEYSHCAWTIVRVEILRNFYFINRLTGYLRN

SEQ ID NO: 543 - protein, 166 aa, Homo sapiens
  IFNB_N86S
MSYNLLGFLQRSSNFQCQKLLWQLNGRLEYCLKDRMNFDIPEEIKQLQQFQKEDAALTIYEMLQNIFAIFRQDSSSTGWNETIVESLLANVYHQINHLKTVLEEKLEKEDFTRGKLMSSLHLKRYYGRILHYLKAKEYSHCAWTIVRVEILRNFYFINRLTGYLRN

SEQ ID NO: 544 - protein, 166 aa, Homo sapiens
  IFNB_N86T
MSYNLLGFLQRSSNFQCQKLLWQLNGRLEYCLKDRMNFDIPEEIKQLQQFQKEDAALTIYEMLQNIFAIFRQDSSSTGWNETIVETLLANVYHQINHLKTVLEEKLEKEDFTRGKLMSSLHLKRYYGRILHYLKAKEYSHCAWTIVRVEILRNFYFINRLTGYLRN

SEQ ID NO: 545 - protein, 166 aa, Homo sapiens
  IFNB_L87D
MSYNLLGFLQRSSNFQCQKLLWQLNGRLEYCLKDRMNFDIPEEIKQLQQFQKEDAALTIYEMLQNIFAIFRQDSSSTGWNETIVENDLANVYHQINHLKTVLEEKLEKEDFTRGKLMSSLHLKRYYGRILHYLKAKEYSHCAWTIVRVEILRNFYFINRLTGYLRN

SEQ ID NO: 546 - protein, 166 aa, Homo sapiens
  IFNB_L87E
MSYNLLGFLQRSSNFQCQKLLWQLNGRLEYCLKDRMNFDIPEEIKQLQQFQKEDAALTIYEMLQNIFAIFRQDSSSTGWNETIVENELANVYHQINHLKTVLEEKLEKEDFTRGKLMSSLHLKRYYGRILHYLKAKEYSHCAWTIVRVEILRNFYFINRLTGYLRN

SEQ ID NO: 547 - protein, 166 aa, Homo sapiens
  IFNB_L87K
MSYNLLGFLQRSSNFQCQKLLWQLNGRLEYCLKDRMNFDIPEEIKQLQQFQKEDAALTIYEMLQNIFAIFRQDSSSTGWNETIVENKLANVYHQINHLKTVLEEKLEKEDFTRGKLMSSLHLKRYYGRILHYLKAKEYSHCAWTIVRVEILRNFYFINRLTGYLRN

SEQ ID NO: 548 - protein, 166 aa, Homo sapiens
  IFNB_L87R
MSYNLLGFLQRSSNFQCQKLLWQLNGRLEYCLKDRMNFDIPEEIKQLQQFQKEDAALTIYEMLQNIFAIFRQDSSSTGWNETIVENRLANVYHQINHLKTVLEEKLEKEDFTRGKLMSSLHLKRYYGRILHYLKAKEYSHCAWTIVRVEILRNFYFINRLTGYLRN

SEQ ID NO: 549 - protein, 166 aa, Homo sapiens
  IFNB_L87N
MSYNLLGFLQRSSNFQCQKLLWQLNGRLEYCLKDRMNFDIPEEIKQLQQFQKEDAALTIYEMLQNIFAIFRQDSSSTGWNETIVENNLANVYHQINHLKTVLEEKLEKEDFTRGKLMSSLHLKRYYGRILHYLKAKEYSHCAWTIVRVEILRNFYFINRLTGYLRN

SEQ ID NO: 550 - protein, 166 aa, Homo sapiens
  IFNB_L87Q
MSYNLLGFLQRSSNFQCQKLLWQLNGRLEYCLKDRMNFDIPEEIKQLQQFQKEDAALTIYEMLQNIFAIFRQDSSSTGWNETIVENQLANVYHQINHLKTVLEEKLEKEDFTRGKLMSSLHLKRYYGRILHYLKAKEYSHCAWTIVRVEILRNFYFINRLTGYLRN

SEQ ID NO: 551 - protein, 166 aa, Homo sapiens
  IFNB_L87S
MSYNLLGFLQRSSNFQCQKLLWQLNGRLEYCLKDRMNFDIPEEIKQLQQFQKEDAALTIYEMLQNIFAIFRQDSSSTGWNETIVENSLANVYHQINHLKTVLEEKLEKEDFTRGKLMSSLHLKRYYGRILHYLKAKEYSHCAWTIVRVEILRNFYFINRLTGYLRN

SEQ ID NO: 552 - protein, 166 aa, Homo sapiens
  IFNB_L87T
MSYNLLGFLQRSSNFQCQKLLWQLNGRLEYCLKDRMNFDIPEEIKQLQQFQKEDAALTIYEMLQNIFAIFRQDSSSTGWNETIVENTLANVYHQINHLKTVLEEKLEKEDFTRGKLMSSLHLKRYYGRILHYLKAKEYSHCAWTIVRVEILRNFYFINRLTGYLRN

SEQ ID NO: 553 - protein, 166 aa, Homo sapiens
  IFNB_A89D
MSYNLLGFLQRSSNFQCQKLLWQLNGRLEYCLKDRMNFDIPEEIKQLQQFQKEDAALTIYEMLQNIFAIFRQDSSSTGWNETIVENLLDNVYHQINHLKTVLEEKLEKEDFTRGKLMSSLHLKRYYGRILHYLKAKEYSHCAWTIVRVEILRNFYFINRLTGYLRN

SEQ ID NO: 554 - protein, 166 aa, Homo sapiens
  IFNB_A89E
MSYNLLGFLQRSSNFQCQKLLWQLNGRLEYCLKDRMNFDIPEEIKQLQQFQKEDAALTIYEMLQNIFAIFRQDSSSTGWNETIVENLLENVYHQINHLKTVLEEKLEKEDFTRGKLMSSLHLKRYYGRILHYLKAKEYSHCAWTIVRVEILRNFYFINRLTGYLRN

SEQ ID NO: 555 - protein, 166 aa, Homo sapiens
  IFNB_A89K
MSYNLLGFLQRSSNFQCQKLLWQLNGRLEYCLKDRMNFDIPEEIKQLQQFQKEDAALTIYEMLQNIFAIFRQDSSSTGWNETIVENLLKNVYHQINHLKTVLEEKLEKEDFTRGKLMSSLHLKRYYGRILHYLKAKEYSHCAWTIVRVEILRNFYFINRLTGYLRN

SEQ ID NO: 556 - protein, 166 aa, Homo sapiens
  IFNB_A89R
MSYNLLGFLQRSSNFQCQKLLWQLNGRLEYCLKDRMNFDIPEEIKQLQQFQKEDAALTIYEMLQNIFAIFRQDSSSTGWNETIVENLLRNVYHQINHLKTVLEEKLEKEDFTRGKLMSSLHLKRYYGRILHYLKAKEYSHCAWTIVRVEILRNFYFINRLTGYLRN

SEQ ID NO: 557 - protein, 166 aa, Homo sapiens
  IFNB_N90D
MSYNLLGFLQRSSNFQCQKLLWQLNGRLEYCLKDRMNFDIPEEIKQLQQFQKEDAALTIYEMLQNIFAIFRQDSSSTGWNETIVENLLADVYHQINHLKTVLEEKLEKEDFTRGKLMSSLHLKRYYGRILHYLKAKEYSHCAWTIVRVEILRNFYFINRLTGYLRN

SEQ ID NO: 558 - protein, 166 aa, Homo sapiens
  IFNB_N90E
MSYNLLGFLQRSSNFQCQKLLWQLNGRLEYCLKDRMNFDIPEEIKQLQQFQKEDAALTIYEMLQNIFAIFRQDSSSTGWNETIVENLLAEVYHQINHLKTVLEEKLEKEDFTRGKLMSSLHLKRYYGRILHYLKAKEYSHCAWTIVRVEILRNFYFINRLTGYLRN

SEQ ID NO: 559 - protein, 166 aa, Homo sapiens
  IFNB_N90K
MSYNLLGFLQRSSNFQCQKLLWQLNGRLEYCLKDRMNFDIPEEIKQLQQFQKEDAALTIYEMLQNIFAIFRQDSSSTGWNETIVENLLAKVYHQINHLKTVLEEKLEKEDFTRGKLMSSLHLKRYYGRILHYLKAKEYSHCAWTIVRVEILRNFYFINRLTGYLRN

SEQ ID NO: 560 - protein, 166 aa, Homo sapiens
  IFNB_N90Q
MSYNLLGFLQRSSNFQCQKLLWQLNGRLEYCLKDRMNFDIPEEIKQLQQFQKEDAALTIYEMLQNIFAIFRQDSSSTGWNETIVENLLAQVYHQINHLKTVLEEKLEKEDFTRGKLMSSLHLKRYYGRILHYLKAKEYSHCAWTIVRVEILRNFYFINRLTGYLRN

SEQ ID NO: 561 - protein, 166 aa, Homo sapiens
  IFNB_N90R
MSYNLLGFLQRSSNFQCQKLLWQLNGRLEYCLKDRMNFDIPEEIKQLQQFQKEDAALTIYEMLQNIFAIFRQDSSSTGWNETIVENLLARVYHQINHLKTVLEEKLEKEDFTRGKLMSSLHLKRYYGRILHYLKAKEYSHCAWTIVRVEILRNFYFINRLTGYLRN

SEQ ID NO: 562 - protein, 166 aa, Homo sapiens
  IFNB_N90S
MSYNLLGFLQRSSNFQCQKLLWQLNGRLEYCLKDRMNFDIPEEIKQLQQFQKEDAALTIYEMLQNIFAIFRQDSSSTGWNETIVENLLASVYHQINHLKTVLEEKLEKEDFTRGKLMSSLHLKRYYGRILHYLKAKEYSHCAWTIVRVEILRNFYFINRLTGYLRN

SEQ ID NO: 563 - protein, 166 aa, Homo sapiens
  IFNB_N90T
MSYNLLGFLQRSSNFQCQKLLWQLNGRLEYCLKDRMNFDIPEEIKQLQQFQKEDAALTIYEMLQNIFAIFRQDSSSTGWNETIVENLLATVYHQINHLKTVLEEKLEKEDFTRGKLMSSLHLKRYYGRILHYLKAKEYSHCAWTIVRVEILRNFYFINRLTGYLRN

SEQ ID NO: 564 - protein, 166 aa, Homo sapiens
  IFNB_V91D
MSYNLLGFLQRSSNFQCQKLLWQLNGRLEYCLKDRMNFDIPEEIKQLQQFQKEDAALTIYEMLQNIFAIFRQDSSSTGWNETIVENLLANDYHQINHLKTVLEEKLEKEDFTRGKLMSSLHLKRYYGRILHYLKAKEYSHCAWTIVRVEILRNFYFINRLTGYLRN

SEQ ID NO: 565 - protein, 166 aa, Homo sapiens
  IFNB_V91E
MSYNLLGFLQRSSNFQCQKLLWQLNGRLEYCLKDRMNFDIPEEIKQLQQFQKEDAALTIYEMLQNIFAIFRQDSSSTGWNETIVENLLANEYHQINHLKTVLEEKLEKEDFTRGKLMSSLHLKRYYGRILHYLKAKEYSHCAWTIVRVEILRNFYFINRLTGYLRN

SEQ ID NO: 566 - protein, 166 aa, Homo sapiens
  IFNB_V91K
MSYNLLGFLQRSSNFQCQKLLWQLNGRLEYCLKDRMNFDIPEEIKQLQQFQKEDAALTIYEMLQNIFAIFRQDSSSTGWNETIVENLLANKYHQINHLKTVLEEKLEKEDFTRGKLMSSLHLKRYYGRILHYLKAKEYSHCAWTIVRVEILRNFYFINRLTGYLRN

SEQ ID NO: 567 - protein, 166 aa, Homo sapiens
  IFNB_V91N
MSYNLLGFLQRSSNFQCQKLLWQLNGRLEYCLKDRMNFDIPEEIKQLQQFQKEDAALTIYEMLQNIFAIFRQDSSSTGWNETIVENLLANNYHQINHLKTVLEEKLEKEDFTRGKLMSSLHLKRYYGRILHYLKAKEYSHCAWTIVRVEILRNFYFINRLTGYLRN

SEQ ID NO: 568 - protein, 166 aa, Homo sapiens
  IFNB_V91Q
MSYNLLGFLQRSSNFQCQKLLWQLNGRLEYCLKDRMNFDIPEEIKQLQQFQKEDAALTIYEMLQNIFAIFRQDSSSTGWNETIVENLLANQYHQINHLKTVLEEKLEKEDFTRGKLMSSLHLKRYYGRILHYLKAKEYSHCAWTIVRVEILRNFYFINRLTGYLRN

SEQ ID NO: 569 - protein, 166 aa, Homo sapiens
  IFNB_V91R
MSYNLLGFLQRSSNFQCQKLLWQLNGRLEYCLKDRMNFDIPEEIKQLQQFQKEDAALTIYEMLQNIFAIFRQDSSSTGWNETIVENLLANRYHQINHLKTVLEEKLEKEDFTRGKLMSSLHLKRYYGRILHYLKAKEYSHCAWTIVRVEILRNFYFINRLTGYLRN

SEQ ID NO: 570 - protein, 166 aa, Homo sapiens
  IFNB_V91S
MSYNLLGFLQRSSNFQCQKLLWQLNGRLEYCLKDRMNFDIPEEIKQLQQFQKEDAALTIYEMLQNIFAIFRQDSSSTGWNETIVENLLANSYHQINHLKTVLEEKLEKEDFTRGKLMSSLHLKRYYGRILHYLKAKEYSHCAWTIVRVEILRNFYFINRLTGYLRN

SEQ ID NO: 571 - protein, 166 aa, Homo sapiens
  IFNB_V91T
MSYNLLGFLQRSSNFQCQKLLWQLNGRLEYCLKDRMNFDIPEEIKQLQQFQKEDAALTIYEMLQNIFAIFRQDSSSTGWNETIVENLLANTYHQINHLKTVLEEKLEKEDFTRGKLMSSLHLKRYYGRILHYLKAKEYSHCAWTIVRVEILRNFYFINRLTGYLRN

SEQ ID NO: 572 - protein, 166 aa, Homo sapiens
  IFNB_Q94D
MSYNLLGFLQRSSNFQCQKLLWQLNGRLEYCLKDRMNFDIPEEIKQLQQFQKEDAALTIYEMLQNIFAIFRQDSSSTGWNETIVENLLANVYHDINHLKTVLEEKLEKEDFTRGKLMSSLHLKRYYGRILHYLKAKEYSHCAWTIVRVEILRNFYFINRLTGYLRN

SEQ ID NO: 573 - protein, 166 aa, Homo sapiens
  IFNB_Q94E
MSYNLLGFLQRSSNFQCQKLLWQLNGRLEYCLKDRMNFDIPEEIKQLQQFQKEDAALTIYEMLQNIFAIFRQDSSSTGWNETIVENLLANVYHEINHLKTVLEEKLEKEDFTRGKLMSSLHLKRYYGRILHYLKAKEYSHCAWTIVRVEILRNFYFINRLTGYLRN

SEQ ID NO: 574 - protein, 166 aa, Homo sapiens
  IFNB_Q94K
MSYNLLGFLQRSSNFQCQKLLWQLNGRLEYCLKDRMNFDIPEEIKQLQQFQKEDAALTIYEMLQNIFAIFRQDSSSTGWNETIVENLLANVYHKINHLKTVLEEKLEKEDFTRGKLMSSLHLKRYYGRILHYLKAKEYSHCAWTIVRVEILRNFYFINRLTGYLRN

SEQ ID NO: 575 - protein, 166 aa, Homo sapiens
  IFNB_Q94N
MSYNLLGFLQRSSNFQCQKLLWQLNGRLEYCLKDRMNFDIPEEIKQLQQFQKEDAALTIYEMLQNIFAIFRQDSSSTGWNETIVENLLANVYHNINHLKTVLEEKLEKEDFTRGKLMSSLHLKRYYGRILHYLKAKEYSHCAWTIVRVEILRNFYFINRLTGYLRN

SEQ ID NO: 576 - protein, 166 aa, Homo sapiens
  IFNB_Q94R
MSYNLLGFLQRSSNFQCQKLLWQLNGRLEYCLKDRMNFDIPEEIKQLQQFQKEDAALTIYEMLQNIFAIFRQDSSSTGWNETIVENLLANVYHRINHLKTVLEEKLEKEDFTRGKLMSSLHLKRYYGRILHYLKAKEYSHCAWTIVRVEILRNFYFINRLTGYLRN

SEQ ID NO: 577 - protein, 166 aa, Homo sapiens
  IFNB_Q94S
MSYNLLGFLQRSSNFQCQKLLWQLNGRLEYCLKDRMNFDIPEEIKQLQQFQKEDAALTIYEMLQNIFAIFRQDSSSTGWNETIVENLLANVYHSINHLKTVLEEKLEKEDFTRGKLMSSLHLKRYYGRILHYLKAKEYSHCAWTIVRVEILRNFYFINRLTGYLRN

SEQ ID NO: 578 - protein, 166 aa, Homo sapiens
  IFNB_Q94T
MSYNLLGFLQRSSNFQCQKLLWQLNGRLEYCLKDRMNFDIPEEIKQLQQFQKEDAALTIYEMLQNIFAIFRQDSSSTGWNETIVENLLANVYHTINHLKTVLEEKLEKEDFTRGKLMSSLHLKRYYGRILHYLKAKEYSHCAWTIVRVEILRNFYFINRLTGYLRN

SEQ ID NO: 579 - protein, 166 aa, Homo sapiens
  IFNB_I95D
MSYNLLGFLQRSSNFQCQKLLWQLNGRLEYCLKDRMNFDIPEEIKQLQQFQKEDAALTIYEMLQNIFAIFRQDSSSTGWNETIVENLLANVYHQDNHLKTVLEEKLEKEDFTRGKLMSSLHLKRYYGRILHYLKAKEYSHCAWTIVRVEILRNFYFINRLTGYLRN

SEQ ID NO: 580 - protein, 166 aa, Homo sapiens
  IFNB_I95E
MSYNLLGFLQRSSNFQCQKLLWQLNGRLEYCLKDRMNFDIPEEIKQLQQFQKEDAALTIYEMLQNIFAIFRQDSSSTGWNETIVENLLANVYHQENHLKTVLEEKLEKEDFTRGKLMSSLHLKRYYGRILHYLKAKEYSHCAWTIVRVEILRNFYFINRLTGYLRN

SEQ ID NO: 581 - protein, 166 aa, Homo sapiens
  IFNB_I95K
MSYNLLGFLQRSSNFQCQKLLWQLNGRLEYCLKDRMNFDIPEEIKQLQQFQKEDAALTIYEMLQNIFAIFRQDSSSTGWNETIVENLLANVYHQKNHLKTVLEEKLEKEDFTRGKLMSSLHLKRYYGRILHYLKAKEYSHCAWTIVRVEILRNFYFINRLTGYLRN

SEQ ID NO: 582 - protein, 166 aa, Homo sapiens
  IFNB_I95N
MSYNLLGFLQRSSNFQCQKLLWQLNGRLEYCLKDRMNFDIPEEIKQLQQFQKEDAALTIYEMLQNIFAIFRQDSSSTGWNETIVENLLANVYHQNNHLKTVLEEKLEKEDFTRGKLMSSLHLKRYYGRILHYLKAKEYSHCAWTIVRVEILRNFYFINRLTGYLRN

SEQ ID NO: 583 - protein, 166 aa, Homo sapiens
  IFNB_I95Q
MSYNLLGFLQRSSNFQCQKLLWQLNGRLEYCLKDRMNFDIPEEIKQLQQFQKEDAALTIYEMLQNIFAIFRQDSSSTGWNETIVENLLANVYHQQNHLKTVLEEKLEKEDFTRGKLMSSLHLKRYYGRILHYLKAKEYSHCAWTIVRVEILRNFYFINRLTGYLRN

SEQ ID NO: 584 - protein, 166 aa, Homo sapiens
  IFNB_I95R
MSYNLLGFLQRSSNFQCQKLLWQLNGRLEYCLKDRMNFDIPEEIKQLQQFQKEDAALTIYEMLQNIFAIFRQDSSSTGWNETIVENLLANVYHQRNHLKTVLEEKLEKEDFTRGKLMSSLHLKRYYGRILHYLKAKEYSHCAWTIVRVEILRNFYFINRLTGYLRN

SEQ ID NO: 585 - protein, 166 aa, Homo sapiens
  IFNB_I95S
MSYNLLGFLQRSSNFQCQKLLWQLNGRLEYCLKDRMNFDIPEEIKQLQQFQKEDAALTIYEMLQNIFAIFRQDSSSTGWNETIVENLLANVYHQSNHLKTVLEEKLEKEDFTRGKLMSSLHLKRYYGRILHYLKAKEYSHCAWTIVRVEILRNFYFINRLTGYLRN

SEQ ID NO: 586 - protein, 166 aa, Homo sapiens
  IFNB_I95T
MSYNLLGFLQRSSNFQCQKLLWQLNGRLEYCLKDRMNFDIPEEIKQLQQFQKEDAALTIYEMLQNIFAIFRQDSSSTGWNETIVENLLANVYHQTNHLKTVLEEKLEKEDFTRGKLMSSLHLKRYYGRILHYLKAKEYSHCAWTIVRVEILRNFYFINRLTGYLRN

SEQ ID NO: 587 - protein, 166 aa, Homo sapiens
  IFNB_H97D
MSYNLLGFLQRSSNFQCQKLLWQLNGRLEYCLKDRMNFDIPEEIKQLQQFQKEDAALTIYEMLQNIFAIFRQDSSSTGWNETIVENLLANVYHQINDLKTVLEEKLEKEDFTRGKLMSSLHLKRYYGRILHYLKAKEYSHCAWTIVRVEILRNFYFINRLTGYLRN

SEQ ID NO: 588 - protein, 166 aa, Homo sapiens
  IFNB_H97E
MSYNLLGFLQRSSNFQCQKLLWQLNGRLEYCLKDRMNFDIPEEIKQLQQFQKEDAALTIYEMLQNIFAIFRQDSSSTGWNETIVENLLANVYHQINELKTVLEEKLEKEDFTRGKLMSSLHLKRYYGRILHYLKAKEYSHCAWTIVRVEILRNFYFINRLTGYLRN

SEQ ID NO: 589 - protein, 166 aa, Homo sapiens
  IFNB_H97K
MSYNLLGFLQRSSNFQCQKLLWQLNGRLEYCLKDRMNFDIPEEIKQLQQFQKEDAALTIYEMLQNIFAIFRQDSSSTGWNETIVENLLANVYHQINKLKTVLEEKLEKEDFTRGKLMSSLHLKRYYGRILHYLKAKEYSHCAWTIVRVEILRNFYFINRLTGYLRN

SEQ ID NO: 590 - protein, 166 aa, Homo sapiens
  IFNB_H97N
MSYNLLGFLQRSSNFQCQKLLWQLNGRLEYCLKDRMNFDIPEEIKQLQQFQKEDAALTIYEMLQNIFAIFRQDSSSTGWNETIVENLLANVYHQINNLKTVLEEKLEKEDFTRGKLMSSLHLKRYYGRILHYLKAKEYSHCAWTIVRVEILRNFYFINRLTGYLRN

SEQ ID NO: 591 - protein, 166 aa, Homo sapiens
  IFNB_H97Q
MSYNLLGFLQRSSNFQCQKLLWQLNGRLEYCLKDRMNFDIPEEIKQLQQFQKEDAALTIYEMLQNIFAIFRQDSSSTGWNETIVENLLANVYHQINQLKTVLEEKLEKEDFTRGKLMSSLHLKRYYGRILHYLKAKEYSHCAWTIVRVEILRNFYFINRLTGYLRN

SEQ ID NO: 592 - protein, 166 aa, Homo sapiens
  IFNB_H97R
MSYNLLGFLQRSSNFQCQKLLWQLNGRLEYCLKDRMNFDIPEEIKQLQQFQKEDAALTIYEMLQNIFAIFRQDSSSTGWNETIVENLLANVYHQINRLKTVLEEKLEKEDFTRGKLMSSLHLKRYYGRILHYLKAKEYSHCAWTIVRVEILRNFYFINRLTGYLRN

SEQ ID NO: 593 - protein, 166 aa, Homo sapiens
  IFNB_H97S
MSYNLLGFLQRSSNFQCQKLLWQLNGRLEYCLKDRMNFDIPEEIKQLQQFQKEDAALTIYEMLQNIFAIFRQDSSSTGWNETIVENLLANVYHQINSLKTVLEEKLEKEDFTRGKLMSSLHLKRYYGRILHYLKAKEYSHCAWTIVRVEILRNFYFINRLTGYLRN

SEQ ID NO: 594 - protein, 166 aa, Homo sapiens
  IFNB_H97T
MSYNLLGFLQRSSNFQCQKLLWQLNGRLEYCLKDRMNFDIPEEIKQLQQFQKEDAALTIYEMLQNIFAIFRQDSSSTGWNETIVENLLANVYHQINTLKTVLEEKLEKEDFTRGKLMSSLHLKRYYGRILHYLKAKEYSHCAWTIVRVEILRNFYFINRLTGYLRN

SEQ ID NO: 595 - protein, 166 aa, Homo sapiens
  IFNB_L98D
MSYNLLGFLQRSSNFQCQKLLWQLNGRLEYCLKDRMNFDIPEEIKQLQQFQKEDAALTIYEMLQNIFAIFRQDSSSTGWNETIVENLLANVYHQINHDKTVLEEKLEKEDFTRGKLMSSLHLKRYYGRILHYLKAKEYSHCAWTIVRVEILRNFYFINRLTGYLRN

SEQ ID NO: 596 - protein, 166 aa, Homo sapiens
  IFNB_L98E
MSYNLLGFLQRSSNFQCQKLLWQLNGRLEYCLKDRMNFDIPEEIKQLQQFQKEDAALTIYEMLQNIFAIFRQDSSSTGWNETIVENLLANVYHQINHEKTVLEEKLEKEDFTRGKLMSSLHLKRYYGRILHYLKAKEYSHCAWTIVRVEILRNFYFINRLTGYLRN

SEQ ID NO: 597 - protein, 166 aa, Homo sapiens
  IFNB_L98K
MSYNLLGFLQRSSNFQCQKLLWQLNGRLEYCLKDRMNFDIPEEIKQLQQFQKEDAALTIYEMLQNIFAIFRQDSSSTGWNETIVENLLANVYHQINHKKTVLEEKLEKEDFTRGKLMSSLHLKRYYGRILHYLKAKEYSHCAWTIVRVEILRNFYFINRLTGYLRN

SEQ ID NO: 598 - protein, 166 aa, Homo sapiens
  IFNB_L98N
MSYNLLGFLQRSSNFQCQKLLWQLNGRLEYCLKDRMNFDIPEEIKQLQQFQKEDAALTIYEMLQNIFAIFRQDSSSTGWNETIVENLLANVYHQINHNKTVLEEKLEKEDFTRGKLMSSLHLKRYYGRILHYLKAKEYSHCAWTIVRVEILRNFYFINRLTGYLRN

SEQ ID NO: 599 - protein, 166 aa, Homo sapiens
  IFNB_L98Q
MSYNLLGFLQRSSNFQCQKLLWQLNGRLEYCLKDRMNFDIPEEIKQLQQFQKEDAALTIYEMLQNIFAIFRQDSSSTGWNETIVENLLANVYHQINHQKTVLEEKLEKEDFTRGKLMSSLHLKRYYGRILHYLKAKEYSHCAWTIVRVEILRNFYFINRLTGYLRN

SEQ ID NO: 600 - protein, 166 aa, Homo sapiens
  IFNB_L98R
MSYNLLGFLQRSSNFQCQKLLWQLNGRLEYCLKDRMNFDIPEEIKQLQQFQKEDAALTIYEMLQNIFAIFRQDSSSTGWNETIVENLLANVYHQINHRKTVLEEKLEKEDFTRGKLMSSLHLKRYYGRILHYLKAKEYSHCAWTIVRVEILRNFYFINRLTGYLRN

SEQ ID NO: 601 - protein, 166 aa, Homo sapiens
  IFNB_L98S
MSYNLLGFLQRSSNFQCQKLLWQLNGRLEYCLKDRMNFDIPEEIKQLQQFQKEDAALTIYEMLQNIFAIFRQDSSSTGWNETIVENLLANVYHQINHSKTVLEEKLEKEDFTRGKLMSSLHLKRYYGRILHYLKAKEYSHCAWTIVRVEILRNFYFINRLTGYLRN

SEQ ID NO: 602 - protein, 166 aa, Homo sapiens
  IFNB_L98T
MSYNLLGFLQRSSNFQCQKLLWQLNGRLEYCLKDRMNFDIPEEIKQLQQFQKEDAALTIYEMLQNIFAIFRQDSSSTGWNETIVENLLANVYHQINHTKTVLEEKLEKEDFTRGKLMSSLHLKRYYGRILHYLKAKEYSHCAWTIVRVEILRNFYFINRLTGYLRN

SEQ ID NO: 603 - protein, 166 aa, Homo sapiens
  IFNB_V101D
MSYNLLGFLQRSSNFQCQKLLWQLNGRLEYCLKDRMNFDIPEEIKQLQQFQKEDAALTIYEMLQNIFAIFRQDSSSTGWNETIVENLLANVYHQINHLKTDLEEKLEKEDFTRGKLMSSLHLKRYYGRILHYLKAKEYSHCAWTIVRVEILRNFYFINRLTGYLRN

SEQ ID NO: 604 - protein, 166 aa, Homo sapiens
  IFNB_V101E
MSYNLLGFLQRSSNFQCQKLLWQLNGRLEYCLKDRMNFDIPEEIKQLQQFQKEDAALTIYEMLQNIFAIFRQDSSSTGWNETIVENLLANVYHQINHLKTELEEKLEKEDFTRGKLMSSLHLKRYYGRILHYLKAKEYSHCAWTIVRVEILRNFYFINRLTGYLRN

SEQ ID NO: 605 - protein, 166 aa, Homo sapiens
  IFNB_V101K
MSYNLLGFLQRSSNFQCQKLLWQLNGRLEYCLKDRMNFDIPEEIKQLQQFQKEDAALTIYEMLQNIFAIFRQDSSSTGWNETIVENLLANVYHQINHLKTKLEEKLEKEDFTRGKLMSSLHLKRYYGRILHYLKAKEYSHCAWTIVRVEILRNFYFINRLTGYLRN

SEQ ID NO: 606 - protein, 166 aa, Homo sapiens
  IFNB_V101N
MSYNLLGFLQRSSNFQCQKLLWQLNGRLEYCLKDRMNFDIPEEIKQLQQFQKEDAALTIYEMLQNIFAIFRQDSSSTGWNETIVENLLANVYHQINHLKTNLEEKLEKEDFTRGKLMSSLHLKRYYGRILHYLKAKEYSHCAWTIVRVEILRNFYFINRLTGYLRN

SEQ ID NO: 607 - protein, 166 aa, Homo sapiens
  IFNB_V101Q
MSYNLLGFLQRSSNFQCQKLLWQLNGRLEYCLKDRMNFDIPEEIKQLQQFQKEDAALTIYEMLQNIFAIFRQDSSSTGWNETIVENLLANVYHQINHLKTQLEEKLEKEDFTRGKLMSSLHLKRYYGRILHYLKAKEYSHCAWTIVRVEILRNFYFINRLTGYLRN

SEQ ID NO: 608 - protein, 166 aa, Homo sapiens
  IFNB_V101R
MSYNLLGFLQRSSNFQCQKLLWQLNGRLEYCLKDRMNFDIPEEIKQLQQFQKEDAALTIYEMLQNIFAIFRQDSSSTGWNETIVENLLANVYHQINHLKTRLEEKLEKEDFTRGKLMSSLHLKRYYGRILHYLKAKEYSHCAWTIVRVEILRNFYFINRLTGYLRN

SEQ ID NO: 609 - protein, 166 aa, Homo sapiens
  IFNB_V101S
MSYNLLGFLQRSSNFQCQKLLWQLNGRLEYCLKDRMNFDIPEEIKQLQQFQKEDAALTIYEMLQNIFAIFRQDSSSTGWNETIVENLLANVYHQINHLKTSLEEKLEKEDFTRGKLMSSLHLKRYYGRILHYLKAKEYSHCAWTIVRVEILRNFYFINRLTGYLRN

SEQ ID NO: 610 - protein, 166 aa, Homo sapiens
  IFNB_V101T
MSYNLLGFLQRSSNFQCQKLLWQLNGRLEYCLKDRMNFDIPEEIKQLQQFQKEDAALTIYEMLQNIFAIFRQDSSSTGWNETIVENLLANVYHQINHLKTTLEEKLEKEDFTRGKLMSSLHLKRYYGRILHYLKAKEYSHCAWTIVRVEILRNFYFINRLTGYLRN

SEQ ID NO: 611 - protein, 166 aa, Homo sapiens
  IFNB_M1C
CSYNLLGFLQRSSNFQCQKLLWQLNGRLEYCLKDRMNFDIPEEIKQLQQFQKEDAALTIYEMLQNIFAIFRQDSSSTGWNETIVENLLANVYHQINHLKTVLEEKLEKEDFTRGKLMSSLHLKRYYGRILHYLKAKEYSHCAWTIVRVEILRNFYFINRLTGYLRN

SEQ ID NO: 612 - protein, 166 aa, Homo sapiens
  IFNB_L6C
MSYNLCGFLQRSSNFQCQKLLWQLNGRLEYCLKDRMNFDIPEEIKQLQQFQKEDAALTIYEMLQNIFAIFRQDSSSTGWNETIVENLLANVYHQINHLKTVLEEKLEKEDFTRGKLMSSLHLKRYYGRILHYLKAKEYSHCAWTIVRVEILRNFYFINRLTGYLRN

SEQ ID NO: 613 - protein, 166 aa, Homo sapiens
  IFNB_Q10C
MSYNLLGFLCRSSNFQCQKLLWQLNGRLEYCLKDRMNFDIPEEIKQLQQFQKEDAALTIYEMLQNIFAIFRQDSSSTGWNETIVENLLANVYHQINHLKTVLEEKLEKEDFTRGKLMSSLHLKRYYGRILHYLKAKEYSHCAWTIVRVEILRNFYFINRLTGYLRN

SEQ ID NO: 614 - protein, 166 aa, Homo sapiens
  IFNB_S13C
MSYNLLGFLQRSCNFQCQKLLWQLNGRLEYCLKDRMNFDIPEEIKQLQQFQKEDAALTIYEMLQNIFAIFRQDSSSTGWNETIVENLLANVYHQINHLKTVLEEKLEKEDFTRGKLMSSLHLKRYYGRILHYLKAKEYSHCAWTIVRVEILRNFYFINRLTGYLRN

SEQ ID NO: 615 - protein, 166 aa, Homo sapiens
  IFNB_Q16C
MSYNLLGFLQRSSNFCCQKLLWQLNGRLEYCLKDRMNFDIPEEIKQLQQFQKEDAALTIYEMLQNIFAIFRQDSSSTGWNETIVENLLANVYHQINHLKTVLEEKLEKEDFTRGKLMSSLHLKRYYGRILHYLKAKEYSHCAWTIVRVEILRNFYFINRLTGYLRN

SEQ ID NO: 616 - protein, 166 aa, Homo sapiens
  IFNB_N90C
MSYNLLGFLQRSSNFQCQKLLWQLNGRLEYCLKDRMNFDIPEEIKQLQQFQKEDAALTIYEMLQNIFAIFRQDSSSTGWNETIVENLLACVYHQINHLKTVLEEKLEKEDFTRGKLMSSLHLKRYYGRILHYLKAKEYSHCAWTIVRVEILRNFYFINRLTGYLRN

SEQ ID NO: 617 - protein, 166 aa, Homo sapiens
  IFNB_V91C
MSYNLLGFLQRSSNFQCQKLLWQLNGRLEYCLKDRMNFDIPEEIKQLQQFQKEDAALTIYEMLQNIFAIFRQDSSSTGWNETIVENLLANCYHQINHLKTVLEEKLEKEDFTRGKLMSSLHLKRYYGRILHYLKAKEYSHCAWTIVRVEILRNFYFINRLTGYLRN

SEQ ID NO: 618 - protein, 166 aa, Homo sapiens
  IFNB_Q94C
MSYNLLGFLQRSSNFQCQKLLWQLNGRLEYCLKDRMNFDIPEEIKQLQQFQKEDAALTIYEMLQNIFAIFRQDSSSTGWNETIVENLLANVYHCINHLKTVLEEKLEKEDFTRGKLMSSLHLKRYYGRILHYLKAKEYSHCAWTIVRVEILRNFYFINRLTGYLRN

SEQ ID NO: 619 - protein, 166 aa, Homo sapiens
  IFNB_H97C
MSYNLLGFLQRSSNFQCQKLLWQLNGRLEYCLKDRMNFDIPEEIKQLQQFQKEDAALTIYEMLQNIFAIFRQDSSSTGWNETIVENLLANVYHQINCLKTVLEEKLEKEDFTRGKLMSSLHLKRYYGRILHYLKAKEYSHCAWTIVRVEILRNFYFINRLTGYLRN

SEQ ID NO: 620 - protein, 166 aa, Homo sapiens
  IFNB_L98C
MSYNLLGFLQRSSNFQCQKLLWQLNGRLEYCLKDRMNFDIPEEIKQLQQFQKEDAALTIYEMLQNIFAIFRQDSSSTGWNETIVENLLANVYHQINHCKTVLEEKLEKEDFTRGKLMSSLHLKRYYGRILHYLKAKEYSHCAWTIVRVEILRNFYFINRLTGYLRN

SEQ ID NO: 621 - protein, 166 aa, Homo sapiens
  IFNB_V101C
MSYNLLGFLQRSSNFQCQKLLWQLNGRLEYCLKDRMNFDIPEEIKQLQQFQKEDAALTIYEMLQNIFAIFRQDSSSTGWNETIVENLLANVYHQINHLKTCLEEKLEKEDFTRGKLMSSLHLKRYYGRILHYLKAKEYSHCAWTIVRVEILRNFYFINRLTGYLRN

SEQ ID NO: 622 - protein, 166 aa, Homo sapiens
  IFNB_L5D/L6E
MSYNDEGFLQRSSNFQCQKLLWQLNGRLEYCLKDRMNFDIPEEIKQLQQFQKEDAALTIYEMLQNIFAIFRQDSSSTGWNETIVENLLANVYHQINHLKTVLEEKLEKEDFTRGKLMSSLHLKRYYGRILHYLKAKEYSHCAWTIVRVEILRNFYFINRLTGYLRN

SEQ ID NO: 623 - protein, 166 aa, Homo sapiens
  IFNB_L5E/Q10D
MSYNELGFLDRSSNFQCQKLLWQLNGRLEYCLKDRMNFDIPEEIKQLQQFQKEDAALTIYEMLQNIFAIFRQDSSSTGWNETIVENLLANVYHQINHLKTVLEEKLEKEDFTRGKLMSSLHLKRYYGRILHYLKAKEYSHCAWTIVRVEILRNFYFINRLTGYLRN

SEQ ID NO: 624 - protein, 166 aa, Homo sapiens
  IFNB_L5Q/M36I
MSYNQLGFLQRSSNFQCQKLLWQLNGRLEYCLKDRINFDIPEEIKQLQQFQKEDAALTIYEMLQNIFAIFRQDSSSTGWNETIVENLLANVYHQINHLKTVLEEKLEKEDFTRGKLMSSLHLKRYYGRILHYLKAKEYSHCAWTIVRVEILRNFYFINRLTGYLRN

SEQ ID NO: 625 - protein, 166 aa, Homo sapiens
  IFNB_L6E/L47I
MSYNLEGFLQRSSNFQCQKLLWQLNGRLEYCLKDRMNFDIPEEIKQIQQFQKEDAALTIYEMLQNIFAIFRQDSSSTGWNETIVENLLANVYHQINHLKTVLEEKLEKEDFTRGKLMSSLHLKRYYGRILHYLKAKEYSHCAWTIVRVEILRNFYFINRLTGYLRN

SEQ ID NO: 626 - protein, 166 aa, Homo sapiens
  IFNB_L5E/K108S
MSYNELGFLQRSSNFQCQKLLWQLNGRLEYCLKDRMNFDIPEEIKQLQQFQKEDAALTIYEMLQNIFAIFRQDSSSTGWNETIVENLLANVYHQINHLKTVLEEKLESEDFTRGKLMSSLHLKRYYGRILHYLKAKEYSHCAWTIVRVEILRNFYFINRLTGYLRN

SEQ ID NO: 627 - protein, 166 aa, Homo sapiens
  IFNB_L5E/L6E
MSYNEEGFLQRSSNFQCQKLLWQLNGRLEYCLKDRMNFDIPEEIKQLQQFQKEDAALTIYEMLQNIFAIFRQDSSSTGWNETIVENLLANVYHQINHLKTVLEEKLEKEDFTRGKLMSSLHLKRYYGRILHYLKAKEYSHCAWTIVRVEILRNFYFINRLTGYLRN

SEQ ID NO: 628 - protein, 166 aa, Homo sapiens
  IFNB_L5D/Q10D
MSYNDLGFLDRSSNFQCQKLLWQLNGRLEYCLKDRMNFDIPEEIKQLQQFQKEDAALTIYEMLQNIFAIFRQDSSSTGWNETIVENLLANVYHQINHLKTVLEEKLEKEDFTRGKLMSSLHLKRYYGRILHYLKAKEYSHCAWTIVRVEILRNFYFINRLTGYLRN

SEQ ID NO: 629 - protein, 166 aa, Homo sapiens
  IFNB_L5N/M36I
MSYNNLGFLQRSSNFQCQKLLWQLNGRLEYCLKDRINFDIPEEIKQLQQFQKEDAALTIYEMLQNIFAIFRQDSSSTGWNETIVENLLANVYHQINHLKTVLEEKLEKEDFTRGKLMSSLHLKRYYGRILHYLKAKEYSHCAWTIVRVEILRNFYFINRLTGYLRN

SEQ ID NO: 630 - protein, 166 aa, Homo sapiens
  IFNB_L6Q/L47I
MSYNLQGFLQRSSNFQCQKLLWQLNGRLEYCLKDRMNFDIPEEIKQIQQFQKEDAALTIYEMLQNIFAIFRQDSSSTGWNETIVENLLANVYHQINHLKTVLEEKLEKEDFTRGKLMSSLHLKRYYGRILHYLKAKEYSHCAWTIVRVEILRNFYFINRLTGYLRN

SEQ ID NO: 631 - protein, 166 aa, Homo sapiens
  IFNB_L5D/K108S
MSYNDLGFLQRSSNFQCQKLLWQLNGRLEYCLKDRMNFDIPEEIKQLQQFQKEDAALTIYEMLQNIFAIFRQDSSSTGWNETIVENLLANVYHQINHLKTVLEEKLESEDFTRGKLMSSLHLKRYYGRILHYLKAKEYSHCAWTIVRVEILRNFYFINRLTGYLRN

SEQ ID NO: 632 - protein, 166 aa, Homo sapiens
  IFNB_L5N/L6E
MSYNNEGFLQRSSNFQCQKLLWQLNGRLEYCLKDRMNFDIPEEIKQLQQFQKEDAALTIYEMLQNIFAIFRQDSSSTGWNETIVENLLANVYHQINHLKTVLEEKLEKEDFTRGKLMSSLHLKRYYGRILHYLKAKEYSHCAWTIVRVEILRNFYFINRLTGYLRN

SEQ ID NO: 633 - protein, 166 aa, Homo sapiens
  IFNB_L5Q/Q10D
MSYNQLGFLDRSSNFQCQKLLWQLNGRLEYCLKDRMNFDIPEEIKQLQQFQKEDAALTIYEMLQNIFAIFRQDSSSTGWNETIVENLLANVYHQINHLKTVLEEKLEKEDFTRGKLMSSLHLKRYYGRILHYLKAKEYSHCAWTIVRVEILRNFYFINRLTGYLRN

SEQ ID NO: 634 - protein, 166 aa, Homo sapiens
  IFNB_L6E/M36I
MSYNLEGFLQRSSNFQCQKLLWQLNGRLEYCLKDRINFDIPEEIKQLQQFQKEDAALTIYEMLQNIFAIFRQDSSSTGWNETIVENLLANVYHQINHLKTVLEEKLEKEDFTRGKLMSSLHLKRYYGRILHYLKAKEYSHCAWTIVRVEILRNFYFINRLTGYLRN

SEQ ID NO: 635 - protein, 166 aa, Homo sapiens
  IFNB_L5E/N86Q
MSYNELGFLQRSSNFQCQKLLWQLNGRLEYCLKDRMNFDIPEEIKQLQQFQKEDAALTIYEMLQNIFAIFRQDSSSTGWNETIVEQLLANVYHQINHLKTVLEEKLEKEDFTRGKLMSSLHLKRYYGRILHYLKAKEYSHCAWTIVRVEILRNFYFINRLTGYLRN

SEQ ID NO: 636 - protein, 166 aa, Homo sapiens
  IFNB_L5Q/K108S
MSYNQLGFLQRSSNFQCQKLLWQLNGRLEYCLKDRMNFDIPEEIKQLQQFQKEDAALTIYEMLQNIFAIFRQDSSSTGWNETIVENLLANVYHQINHLKTVLEEKLESEDFTRGKLMSSLHLKRYYGRILHYLKAKEYSHCAWTIVRVEILRNFYFINRLTGYLRN

SEQ ID NO: 637 - protein, 166 aa, Homo sapiens
  IFNB_L5Q/L6E
MSYNQEGFLQRSSNFQCQKLLWQLNGRLEYCLKDRMNFDIPEEIKQLQQFQKEDAALTIYEMLQNIFAIFRQDSSSTGWNETIVENLLANVYHQINHLKTVLEEKLEKEDFTRGKLMSSLHLKRYYGRILHYLKAKEYSHCAWTIVRVEILRNFYFINRLTGYLRN

SEQ ID NO: 638 - protein, 166 aa, Homo sapiens
  IFNB_L5N/Q10D
MSYNNLGFLDRSSNFQCQKLLWQLNGRLEYCLKDRMNFDIPEEIKQLQQFQKEDAALTIYEMLQNIFAIFRQDSSSTGWNETIVENLLANVYHQINHLKTVLEEKLEKEDFTRGKLMSSLHLKRYYGRILHYLKAKEYSHCAWTIVRVEILRNFYFINRLTGYLRN

SEQ ID NO: 639 - protein, 166 aa, Homo sapiens
  IFNB_L6Q/M36I
MSYNLQGFLQRSSNFQCQKLLWQLNGRLEYCLKDRINFDIPEEIKQLQQFQKEDAALTIYEMLQNIFAIFRQDSSSTGWNETIVENLLANVYHQINHLKTVLEEKLEKEDFTRGKLMSSLHLKRYYGRILHYLKAKEYSHCAWTIVRVEILRNFYFINRLTGYLRN

SEQ ID NO: 640 - protein, 166 aa, Homo sapiens
  IFNB_L5D/N86Q
MSYNDLGFLQRSSNFQCQKLLWQLNGRLEYCLKDRMNFDIPEEIKQLQQFQKEDAALTIYEMLQNIFAIFRQDSSSTGWNETIVEQLLANVYHQINHLKTVLEEKLEKEDFTRGKLMSSLHLKRYYGRILHYLKAKEYSHCAWTIVRVEILRNFYFINRLTGYLRN

SEQ ID NO: 641 - protein, 166 aa, Homo sapiens
  IFNB_L5N/K108S
MSYNNLGFLQRSSNFQCQKLLWQLNGRLEYCLKDRMNFDIPEEIKQLQQFQKEDAALTIYEMLQNIFAIFRQDSSSTGWNETIVENLLANVYHQINHLKTVLEEKLESEDFTRGKLMSSLHLKRYYGRILHYLKAKEYSHCAWTIVRVEILRNFYFINRLTGYLRN

SEQ ID NO: 642 - protein, 166 aa, Homo sapiens
  IFNB_L5D/L6Q
MSYNDQGFLQRSSNFQCQKLLWQLNGRLEYCLKDRMNFDIPEEIKQLQQFQKEDAALTIYEMLQNIFAIFRQDSSSTGWNETIVENLLANVYHQINHLKTVLEEKLEKEDFTRGKLMSSLHLKRYYGRILHYLKAKEYSHCAWTIVRVEILRNFYFINRLTGYLRN

SEQ ID NO: 643 - protein, 166 aa, Homo sapiens
  IFNB_L6E/Q10D
MSYNLEGFLDRSSNFQCQKLLWQLNGRLEYCLKDRMNFDIPEEIKQLQQFQKEDAALTIYEMLQNIFAIFRQDSSSTGWNETIVENLLANVYHQINHLKTVLEEKLEKEDFTRGKLMSSLHLKRYYGRILHYLKAKEYSHCAWTIVRVEILRNFYFINRLTGYLRN

SEQ ID NO: 644 - protein, 166 aa, Homo sapiens
  IFNB_L5E/L47I
MSYNELGFLQRSSNFQCQKLLWQLNGRLEYCLKDRMNFDIPEEIKQIQQFQKEDAALTIYEMLQNIFAIFRQDSSSTGWNETIVENLLANVYHQINHLKTVLEEKLEKEDFTRGKLMSSLHLKRYYGRILHYLKAKEYSHCAWTIVRVEILRNFYFINRLTGYLRN

SEQ ID NO: 645 - protein, 166 aa, Homo sapiens
  IFNB_L5Q/N86Q
MSYNQLGFLQRSSNFQCQKLLWQLNGRLEYCLKDRMNFDIPEEIKQLQQFQKEDAALTIYEMLQNIFAIFRQDSSSTGWNETIVEQLLANVYHQINHLKTVLEEKLEKEDFTRGKLMSSLHLKRYYGRILHYLKAKEYSHCAWTIVRVEILRNFYFINRLTGYLRN

SEQ ID NO: 646 - protein, 166 aa, Homo sapiens
  IFNB_L6E/K108S
MSYNLEGFLQRSSNFQCQKLLWQLNGRLEYCLKDRMNFDIPEEIKQLQQFQKEDAALTIYEMLQNIFAIFRQDSSSTGWNETIVENLLANVYHQINHLKTVLEEKLESEDFTRGKLMSSLHLKRYYGRILHYLKAKEYSHCAWTIVRVEILRNFYFINRLTGYLRN

SEQ ID NO: 647 - protein, 166 aa, Homo sapiens
  IFNB_L5E/L6Q
MSYNEQGFLQRSSNFQCQKLLWQLNGRLEYCLKDRMNFDIPEEIKQLQQFQKEDAALTIYEMLQNIFAIFRQDSSSTGWNETIVENLLANVYHQINHLKTVLEEKLEKEDFTRGKLMSSLHLKRYYGRILHYLKAKEYSHCAWTIVRVEILRNFYFINRLTGYLRN

SEQ ID NO: 648 - protein, 166 aa, Homo sapiens
  IFNB_L6Q/Q10D
MSYNLQGFLDRSSNFQCQKLLWQLNGRLEYCLKDRMNFDIPEEIKQLQQFQKEDAALTIYEMLQNIFAIFRQDSSSTGWNETIVENLLANVYHQINHLKTVLEEKLEKEDFTRGKLMSSLHLKRYYGRILHYLKAKEYSHCAWTIVRVEILRNFYFINRLTGYLRN

SEQ ID NO: 649 - protein, 166 aa, Homo sapiens
  IFNB_L5D/L47I
MSYNDLGFLQRSSNFQCQKLLWQLNGRLEYCLKDRMNFDIPEEIKQIQQFQKEDAALTIYEMLQNIFAIFRQDSSSTGWNETIVENLLANVYHQINHLKTVLEEKLEKEDFTRGKLMSSLHLKRYYGRILHYLKAKEYSHCAWTIVRVEILRNFYFINRLTGYLRN

SEQ ID NO: 650 - protein, 166 aa, Homo sapiens
  IFNB_L5N/N86Q
MSYNNLGFLQRSSNFQCQKLLWQLNGRLEYCLKDRMNFDIPEEIKQLQQFQKEDAALTIYEMLQNIFAIFRQDSSSTGWNETIVEQLLANVYHQINHLKTVLEEKLEKEDFTRGKLMSSLHLKRYYGRILHYLKAKEYSHCAWTIVRVEILRNFYFINRLTGYLRN

SEQ ID NO: 651 - protein, 166 aa, Homo sapiens
  IFNB_L6Q/K108S
MSYNLQGFLQRSSNFQCQKLLWQLNGRLEYCLKDRMNFDIPEEIKQLQQFQKEDAALTIYEMLQNIFAIFRQDSSSTGWNETIVENLLANVYHQINHLKTVLEEKLESEDFTRGKLMSSLHLKRYYGRILHYLKAKEYSHCAWTIVRVEILRNFYFINRLTGYLRN

SEQ ID NO: 652 - protein, 166 aa, Homo sapiens
  IFNB_L5N/L6Q
MSYNNQGFLQRSSNFQCQKLLWQLNGRLEYCLKDRMNFDIPEEIKQLQQFQKEDAALTIYEMLQNIFAIFRQDSSSTGWNETIVENLLANVYHQINHLKTVLEEKLEKEDFTRGKLMSSLHLKRYYGRILHYLKAKEYSHCAWTIVRVEILRNFYFINRLTGYLRN

SEQ ID NO: 653 - protein, 166 aa, Homo sapiens
  IFNB_L5E/M36I
MSYNELGFLQRSSNFQCQKLLWQLNGRLEYCLKDRINFDIPEEIKQLQQFQKEDAALTIYEMLQNIFAIFRQDSSSTGWNETIVENLLANVYHQINHLKTVLEEKLEKEDFTRGKLMSSLHLKRYYGRILHYLKAKEYSHCAWTIVRVEILRNFYFINRLTGYLRN

SEQ ID NO: 654 - protein, 166 aa, Homo sapiens
  IFNB_L5Q/L47I
MSYNQLGFLQRSSNFQCQKLLWQLNGRLEYCLKDRMNFDIPEEIKQIQQFQKEDAALTIYEMLQNIFAIFRQDSSSTGWNETIVENLLANVYHQINHLKTVLEEKLEKEDFTRGKLMSSLHLKRYYGRILHYLKAKEYSHCAWTIVRVEILRNFYFINRLTGYLRN

SEQ ID NO: 655 - protein, 166 aa, Homo sapiens
  IFNB_L6E/N86Q
MSYNLEGFLQRSSNFQCQKLLWQLNGRLEYCLKDRMNFDIPEEIKQLQQFQKEDAALTIYEMLQNIFAIFRQDSSSTGWNETIVEQLLANVYHQINHLKTVLEEKLEKEDFTRGKLMSSLHLKRYYGRILHYLKAKEYSHCAWTIVRVEILRNFYFINRLTGYLRN

SEQ ID NO: 656 - protein, 166 aa, Homo sapiens
  IFNB_L5Q/L6Q
MSYNQQGFLQRSSNFQCQKLLWQLNGRLEYCLKDRMNFDIPEEIKQLQQFQKEDAALTIYEMLQNIFAIFRQDSSSTGWNETIVENLLANVYHQINHLKTVLEEKLEKEDFTRGKLMSSLHLKRYYGRILHYLKAKEYSHCAWTIVRVEILRNFYFINRLTGYLRN

SEQ ID NO: 657 - protein, 166 aa, Homo sapiens
  IFNB_L5D/M36I
MSYNDLGFLQRSSNFQCQKLLWQLNGRLEYCLKDRINFDIPEEIKQLQQFQKEDAALTIYEMLQNIFAIFRQDSSSTGWNETIVENLLANVYHQINHLKTVLEEKLEKEDFTRGKLMSSLHLKRYYGRILHYLKAKEYSHCAWTIVRVEILRNFYFINRLTGYLRN

SEQ ID NO: 658 - protein, 166 aa, Homo sapiens
  IFNB_L5N/L47I
MSYNNLGFLQRSSNFQCQKLLWQLNGRLEYCLKDRMNFDIPEEIKQIQQFQKEDAALTIYEMLQNIFAIFRQDSSSTGWNETIVENLLANVYHQINHLKTVLEEKLEKEDFTRGKLMSSLHLKRYYGRILHYLKAKEYSHCAWTIVRVEILRNFYFINRLTGYLRN

SEQ ID NO: 659 - protein, 166 aa, Homo sapiens
  IFNB_L6Q/N86Q
MSYNLQGFLQRSSNFQCQKLLWQLNGRLEYCLKDRMNFDIPEEIKQLQQFQKEDAALTIYEMLQNIFAIFRQDSSSTGWNETIVEQLLANVYHQINHLKTVLEEKLEKEDFTRGKLMSSLHLKRYYGRILHYLKAKEYSHCAWTIVRVEILRNFYFINRLTGYLRN

SEQ ID NO: 660 - protein, 166 aa, Homo sapiens; identical to SEQ ID NO: 646
  IFNB_L6E/K108S

SEQ ID NO: 661 - protein, 146 aa, Homo sapiens
  IFNG_WT
CYCQDPYVKEAENLKKYFNAGHSDVADNGTLFLGILKNWKEESDRKIMQSQIVSFYFKLFKNFKDDQSIQKSVETIKEDMNVKFFNSNKKKRDDFEKLTNYSVTDLNVQRKAIHELIQVMAELSPAAKTGKRKRSQMLFRGRRASQ

SEQ ID NO: 662 - protein, 146 aa, Homo sapiens
  IFNG_Y2H
CHCQDPYVKEAENLKKYFNAGHSDVADNGTLFLGILKNWKEESDRKIMQSQIVSFYFKLFKNFKDDQSIQKSVETIKEDMNVKFFNSNKKKRDDFEKLTNYSVTDLNVQRKAIHELIQVMAELSPAAKTGKRKRSQMLFRGRRASQ

SEQ ID NO: 663 - protein, 146 aa, Homo sapiens
  IFNG_Y2I
CICQDPYVKEAENLKKYFNAGHSDVADNGTLFLGILKNWKEESDRKIMQSQIVSFYFKLFKNFKDDQSIQKSVETIKEDMNVKFFNSNKKKRDDFEKLTNYSVTDLNVQRKAIHELIQVMAELSPAAKTGKRKRSQMLFRGRRASQ

SEQ ID NO: 664 - protein, 146 aa, Homo sapiens
  IFNG_D5N
CYCQNPYVKEAENLKKYFNAGHSDVADNGTLFLGILKNWKEESDRKIMQSQIVSFYFKLFKNFKDDQSIQKSVETIKEDMNVKFFNSNKKKRDDFEKLTNYSVTDLNVQRKAIHELIQVMAELSPAAKTGKRKRSQMLFRGRRASQ

SEQ ID NO: 665 - protein, 146 aa, Homo sapiens
  IFNG_D5Q
CYCQQPYVKEAENLKKYFNAGHSDVADNGTLFLGILKNWKEESDRKIMQSQIVSFYFKLFKNFKDDQSIQKSVETIKEDMNVKFFNSNKKKRDDFEKLTNYSVTDLNVQRKAIHELIQVMAELSPAAKTGKRKRSQMLFRGRRASQ

SEQ ID NO: 666 - protein, 146 aa, Homo sapiens
  IFNG_P6A
CYCQDAYVKEAENLKKYFNAGHSDVADNGTLFLGILKNWKEESDRKIMQSQIVSFYFKLFKNFKDDQSIQKSVETIKEDMNVKFFNSNKKKRDDFEKLTNYSVTDLNVQRKAIHELIQVMAELSPAAKTGKRKRSQMLFRGRRASQ

SEQ ID NO: 667 - protein, 146 aa, Homo sapiens
  IFNG_P6S
CYCQDSYVKEAENLKKYFNAGHSDVADNGTLFLGILKNWKEESDRKIMQSQIVSFYFKLFKNFKDDQSIQKSVETIKEDMNVKFFNSNKKKRDDFEKLTNYSVTDLNVQRKAIHELIQVMAELSPAAKTGKRKRSQMLFRGRRASQ

SEQ ID NO: 668 - protein, 146 aa, Homo sapiens
  IFNG_Y7H
CYCQDPHVKEAENLKKYFNAGHSDVADNGTLFLGILKNWKEESDRKIMQSQIVSFYFKLFKNFKDDQSIQKSVETIKEDMNVKFFNSNKKKRDDFEKLTNYSVTDLNVQRKAIHELIQVMAELSPAAKTGKRKRSQMLFRGRRASQ

SEQ ID NO: 669 - protein, 146 aa, Homo sapiens
  IFNG_Y7I
CYCQDPIVKEAENLKKYFNAGHSDVADNGTLFLGILKNWKEESDRKIMQSQIVSFYFKLFKNFKDDQSIQKSVETIKEDMNVKFFNSNKKKRDDFEKLTNYSVTDLNVQRKAIHELIQVMAELSPAAKTGKRKRSQMLFRGRRASQ

SEQ ID NO: 670 - protein, 146 aa, Homo sapiens
  IFNG_K9N
CYCQDPYVNEAENLKKYFNAGHSDVADNGTLFLGILKNWKEESDRKIMQSQIVSFYFKLFKNFKDDQSIQKSVETIKEDMNVKFFNSNKKKRDDFEKLTNYSVTDLNVQRKAIHELIQVMAELSPAAKTGKRKRSQMLFRGRRASQ

SEQ ID NO: 671 - protein, 146 aa, Homo sapiens
  IFNG_K9Q
CYCQDPYVQEAENLKKYFNAGHSDVADNGTLFLGILKNWKEESDRKIMQSQIVSFYFKLFKNFKDDQSIQKSVETIKEDMNVKFFNSNKKKRDDFEKLTNYSVTDLNVQRKAIHELIQVMAELSPAAKTGKRKRSQMLFRGRRASQ

SEQ ID NO: 672 - protein, 146 aa, Homo sapiens
  IFNG_E10N
CYCQDPYVKNAENLKKYFNAGHSDVADNGTLFLGILKNWKEESDRKIMQSQIVSFYFKLFKNFKDDQSIQKSVETIKEDMNVKFFNSNKKKRDDFEKLTNYSVTDLNVQRKAIHELIQVMAELSPAAKTGKRKRSQMLFRGRRASQ

SEQ ID NO: 673 - protein, 146 aa, Homo sapiens
  IFNG_E10Q
CYCQDPYVKQAENLKKYFNAGHSDVADNGTLFLGILKNWKEESDRKIMQSQIVSFYFKLFKNFKDDQSIQKSVETIKEDMNVKFFNSNKKKRDDFEKLTNYSVTDLNVQRKAIHELIQVMAELSPAAKTGKRKRSQMLFRGRRASQ

SEQ ID NO: 674 - protein, 146 aa, Homo sapiens
  IFNG_E10H
CYCQDPYVKHAENLKKYFNAGHSDVADNGTLFLGILKNWKEESDRKIMQSQIVSFYFKLFKNFKDDQSIQKSVETIKEDMNVKFFNSNKKKRDDFEKLTNYSVTDLNVQRKAIHELIQVMAELSPAAKTGKRKRSQMLFRGRRASQ

SEQ ID NO: 675 - protein, 146 aa, Homo sapiens
  IFNG_E12N
CYCQDPYVKEANNLKKYFNAGHSDVADNGTLFLGILKNWKEESDRKIMQSQIVSFYFKLFKNFKDDQSIQKSVETIKEDMNVKFFNSNKKKRDDFEKLTNYSVTDLNVQRKAIHELIQVMAELSPAAKTGKRKRSQMLFRGRRASQ

SEQ ID NO: 676 - protein, 146 aa, Homo sapiens
  IFNG_E12Q
CYCQDPYVKEAQNLKKYFNAGHSDVADNGTLFLGILKNWKEESDRKIMQSQIVSFYFKLFKNFKDDQSIQKSVETIKEDMNVKFFNSNKKKRDDFEKLTNYSVTDLNVQRKAIHELIQVMAELSPAAKTGKRKRSQMLFRGRRASQ

SEQ ID NO: 677 - protein, 146 aa, Homo sapiens
  IFNG_E12H
CYCQDPYVKEAHNLKKYFNAGHSDVADNGTLFLGILKNWKEESDRKIMQSQIVSFYFKLFKNFKDDQSIQKSVETIKEDMNVKFFNSNKKKRDDFEKLTNYSVTDLNVQRKAIHELIQVMAELSPAAKTGKRKRSQMLFRGRRASQ

SEQ ID NO: 678 - protein, 146 aa, Homo sapiens
  IFNG_L14I
CYCQDPYVKEAENIKKYFNAGHSDVADNGTLFLGILKNWKEESDRKIMQSQIVSFYFKLFKNFKDDQSIQKSVETIKEDMNVKFFNSNKKKRDDFEKLTNYSVTDLNVQRKAIHELIQVMAELSPAAKTGKRKRSQMLFRGRRASQ

SEQ ID NO: 679 - protein, 146 aa, Homo sapiens
  IFNG_L14V
CYCQDPYVKEAENVKKYFNAGHSDVADNGTLFLGILKNWKEESDRKIMQSQIVSFYFKLFKNFKDDQSIQKSVETIKEDMNVKFFNSNKKKRDDFEKLTNYSVTDLNVQRKAIHELIQVMAELSPAAKTGKRKRSQMLFRGRRASQ

SEQ ID NO: 680 - protein, 146 aa, Homo sapiens
  IFNG_K15N
CYCQDPYVKEAENLNKYFNAGHSDVADNGTLFLGILKNWKEESDRKIMQSQIVSFYFKLFKNFKDDQSIQKSVETIKEDMNVKFFNSNKKKRDDFEKLTNYSVTDLNVQRKAIHELIQVMAELSPAAKTGKRKRSQMLFRGRRASQ

SEQ ID NO: 681 - protein, 146 aa, Homo sapiens
  IFNG_K15Q
CYCQDPYVKEAENLQKYFNAGHSDVADNGTLFLGILKNWKEESDRKIMQSQIVSFYFKLFKNFKDDQSIQKSVETIKEDMNVKFFNSNKKKRDDFEKLTNYSVTDLNVQRKAIHELIQVMAELSPAAKTGKRKRSQMLFRGRRASQ

SEQ ID NO: 682 - protein, 146 aa, Homo sapiens
  IFNG_K16N
CYCQDPYVKEAENLKNYFNAGHSDVADNGTLFLGILKNWKEESDRKIMQSQIVSFYFKLFKNFKDDQSIQKSVETIKEDMNVKFFNSNKKKRDDFEKLTNYSVTDLNVQRKAIHELIQVMAELSPAAKTGKRKRSQMLFRGRRASQ

SEQ ID NO: 683 - protein, 146 aa, Homo sapiens
  IFNG_K16Q
CYCQDPYVKEAENLKQYFNAGHSDVADNGTLFLGILKNWKEESDRKIMQSQIVSFYFKLFKNFKDDQSIQKSVETIKEDMNVKFFNSNKKKRDDFEKLTNYSVTDLNVQRKAIHELIQVMAELSPAAKTGKRKRSQMLFRGRRASQ

SEQ ID NO: 684 - protein, 146 aa, Homo sapiens
  IFNG_Y17H
CYCQDPYVKEAENLKKHFNAGHSDVADNGTLFLGILKNWKEESDRKIMQSQIVSFYFKLFKNFKDDQSIQKSVETIKEDMNVKFFNSNKKKRDDFEKLTNYSVTDLNVQRKAIHELIQVMAELSPAAKTGKRKRSQMLFRGRRASQ

SEQ ID NO: 685 - protein, 146 aa, Homo sapiens
  IFNG_Y17I
CYCQDPYVKEAENLKKIFNAGHSDVADNGTLFLGILKNWKEESDRKIMQSQIVSFYFKLFKNFKDDQSIQKSVETIKEDMNVKFFNSNKKKRDDFEKLTNYSVTDLNVQRKAIHELIQVMAELSPAAKTGKRKRSQMLFRGRRASQ

SEQ ID NO: 686 - protein, 146 aa, Homo sapiens
  IFNG_F18I
CYCQDPYVKEAENLKKYINAGHSDVADNGTLFLGILKNWKEESDRKIMQSQIVSFYFKLFKNFKDDQSIQKSVETIKEDMNVKFFNSNKKKRDDFEKLTNYSVTDLNVQRKAIHELIQVMAELSPAAKTGKRKRSQMLFRGRRASQ

SEQ ID NO: 687 - protein, 146 aa, Homo sapiens
  IFNG_F18V
CYCQDPYVKEAENLKKYVNAGHSDVADNGTLFLGILKNWKEESDRKIMQSQIVSFYFKLFKNFKDDQSIQKSVETIKEDMNVKFFNSNKKKRDDFEKLTNYSVTDLNVQRKAIHELIQVMAELSPAAKTGKRKRSQMLFRGRRASQ

SEQ ID NO: 688 - protein, 146 aa, Homo sapiens
  IFNG_D24N
CYCQDPYVKEAENLKKYFNAGHSNVADNGTLFLGILKNWKEESDRKIMQSQIVSFYFKLFKNFKDDQSIQKSVETIKEDMNVKFFNSNKKKRDDFEKLTNYSVTDLNVQRKAIHELIQVMAELSPAAKTGKRKRSQMLFRGRRASQ

SEQ ID NO: 689 - protein, 146 aa, Homo sapiens
  IFNG_D24Q
CYCQDPYVKEAENLKKYFNAGHSQVADNGTLFLGILKNWKEESDRKIMQSQIVSFYFKLFKNFKDDQSIQKSVETIKEDMNVKFFNSNKKKRDDFEKLTNYSVTDLNVQRKAIHELIQVMAELSPAAKTGKRKRSQMLFRGRRASQ

SEQ ID NO: 690 - protein, 146 aa, Homo sapiens
  IFNG_D27N
CYCQDPYVKEAENLKKYFNAGHSDVANNGTLFLGILKNWKEESDRKIMQSQIVSFYFKLFKNFKDDQSIQKSVETIKEDMNVKFFNSNKKKRDDFEKLTNYSVTDLNVQRKAIHELIQVMAELSPAAKTGKRKRSQMLFRGRRASQ

SEQ ID NO: 691 - protein, 146 aa, Homo sapiens
  IFNG_D27Q
CYCQDPYVKEAENLKKYFNAGHSDVAQNGTLFLGILKNWKEESDRKIMQSQIVSFYFKLFKNFKDDQSIQKSVETIKEDMNVKFFNSNKKKRDDFEKLTNYSVTDLNVQRKAIHELIQVMAELSPAAKTGKRKRSQMLFRGRRASQ

SEQ ID NO: 692 - protein, 146 aa, Homo sapiens
  IFNG_N28Q
CYCQDPYVKEAENLKKYFNAGHSDVADQGTLFLGILKNWKEESDRKIMQSQIVSFYFKLFKNFKDDQSIQKSVETIKEDMNVKFFNSNKKKRDDFEKLTNYSVTDLNVQRKAIHELIQVMAELSPAAKTGKRKRSQMLFRGRRASQ

SEQ ID NO: 693 - protein, 146 aa, Homo sapiens
  IFNG_N28S
CYCQDPYVKEAENLKKYFNAGHSDVADSGTLFLGILKNWKEESDRKIMQSQIVSFYFKLFKNFKDDQSIQKSVETIKEDMNVKFFNSNKKKRDDFEKLTNYSVTDLNVQRKAIHELIQVMAELSPAAKTGKRKRSQMLFRGRRASQ

SEQ ID NO: 694 - protein, 146 aa, Homo sapiens
  IFNG_L31I
CYCQDPYVKEAENLKKYFNAGHSDVADNGTIFLGILKNWKEESDRKIMQSQIVSFYFKLFKNFKDDQSIQKSVETIKEDMNVKFFNSNKKKRDDFEKLTNYSVTDLNVQRKAIHELIQVMAELSPAAKTGKRKRSQMLFRGRRASQ

SEQ ID NO: 695 - protein, 146 aa, Homo sapiens
  IFNG_L31V
CYCQDPYVKEAENLKKYFNAGHSDVADNGTVFLGILKNWKEESDRKIMQSQIVSFYFKLFKNFKDDQSIQKSVETIKEDMNVKFFNSNKKKRDDFEKLTNYSVTDLNVQRKAIHELIQVMAELSPAAKTGKRKRSQMLFRGRRASQ

SEQ ID NO: 696 - protein, 146 aa, Homo sapiens
  IFNG_F32I
CYCQDPYVKEAENLKKYFNAGHSDVADNGTLILGILKNWKEESDRKIMQSQIVSFYFKLFKNFKDDQSIQKSVETIKEDMNVKFFNSNKKKRDDFEKLTNYSVTDLNVQRKAIHELIQVMAELSPAAKTGKRKRSQMLFRGRRASQ

SEQ ID NO: 697 - protein, 146 aa, Homo sapiens
  IFNG_F32V
CYCQDPYVKEAENLKKYFNAGHSDVADNGTLVLGILKNWKEESDRKIMQSQIVSFYFKLFKNFKDDQSIQKSVETIKEDMNVKFFNSNKKKRDDFEKLTNYSVTDLNVQRKAIHELIQVMAELSPAAKTGKRKRSQMLFRGRRASQ

SEQ ID NO: 698 - protein, 146 aa, Homo sapiens
  IFNG_L33I
CYCQDPYVKEAENLKKYFNAGHSDVADNGTLFIGILKNWKEESDRKIMQSQIVSFYFKLFKNFKDDQSIQKSVETIKEDMNVKFFNSNKKKRDDFEKLTNYSVTDLNVQRKAIHELIQVMAELSPAAKTGKRKRSQMLFRGRRASQ

SEQ ID NO: 699 - protein, 146 aa, Homo sapiens
  IFNG_L33V
CYCQDPYVKEAENLKKYFNAGHSDVADNGTLFVGILKNWKEESDRKIMQSQIVSFYFKLFKNFKDDQSIQKSVETIKEDMNVKFFNSNKKKRDDFEKLTNYSVTDLNVQRKAIHELIQVMAELSPAAKTGKRKRSQMLFRGRRASQ

SEQ ID NO: 700 - protein, 146 aa, Homo sapiens
  IFNG_L36I
CYCQDPYVKEAENLKKYFNAGHSDVADNGTLFLGIIKNWKEESDRKIMQSQIVSFYFKLFKNFKDDQSIQKSVETIKEDMNVKFFNSNKKKRDDFEKLTNYSVTDLNVQRKAIHELIQVMAELSPAAKTGKRKRSQMLFRGRRASQ

SEQ ID NO: 701 - protein, 146 aa, Homo sapiens
  IFNG_L36V
CYCQDPYVKEAENLKKYFNAGHSDVADNGTLFLGIVKNWKEESDRKIMQSQIVSFYFKLFKNFKDDQSIQKSVETIKEDMNVKFFNSNKKKRDDFEKLTNYSVTDLNVQRKAIHELIQVMAELSPAAKTGKRKRSQMLFRGRRASQ

SEQ ID NO: 702 - protein, 146 aa, Homo sapiens
  IFNG_K37N
CYCQDPYVKEAENLKKYFNAGHSDVADNGTLFLGILNNWKEESDRKIMQSQIVSFYFKLFKNFKDDQSIQKSVETIKEDMNVKFFNSNKKKRDDFEKLTNYSVTDLNVQRKAIHELIQVMAELSPAAKTGKRKRSQMLFRGRRASQ

SEQ ID NO: 703 - protein, 146 aa, Homo sapiens
  IFNG_K37Q
CYCQDPYVKEAENLKKYFNAGHSDVADNGTLFLGILQNWKEESDRKIMQSQIVSFYFKLFKNFKDDQSIQKSVETIKEDMNVKFFNSNKKKRDDFEKLTNYSVTDLNVQRKAIHELIQVMAELSPAAKTGKRKRSQMLFRGRRASQ

SEQ ID NO: 704 - protein, 146 aa, Homo sapiens
  IFNG_W39S
CYCQDPYVKEAENLKKYFNAGHSDVADNGTLFLGILKNSKEESDRKIMQSQIVSFYFKLFKNFKDDQSIQKSVETIKEDMNVKFFNSNKKKRDDFEKLTNYSVTDLNVQRKAIHELIQVMAELSPAAKTGKRKRSQMLFRGRRASQ

SEQ ID NO: 705 - protein, 146 aa, Homo sapiens
  IFNG_W39H
CYCQDPYVKEAENLKKYFNAGHSDVADNGTLFLGILKNHKEESDRKIMQSQIVSFYFKLFKNFKDDQSIQKSVETIKEDMNVKFFNSNKKKRDDFEKLTNYSVTDLNVQRKAIHELIQVMAELSPAAKTGKRKRSQMLFRGRRASQ

SEQ ID NO: 706 - protein, 146 aa, Homo sapiens
  IFNG_K40N
CYCQDPYVKEAENLKKYFNAGHSDVADNGTLFLGILKNWNEESDRKIMQSQIVSFYFKLFKNFKDDQSIQKSVETIKEDMNVKFFNSNKKKRDDFEKLTNYSVTDLNVQRKAIHELIQVMAELSPAAKTGKRKRSQMLFRGRRASQ

SEQ ID NO: 707 - protein, 146 aa, Homo sapiens
  IFNG_K40Q
CYCQDPYVKEAENLKKYFNAGHSDVADNGTLFLGILKNWQEESDRKIMQSQIVSFYFKLFKNFKDDQSIQKSVETIKEDMNVKFFNSNKKKRDDFEKLTNYSVTDLNVQRKAIHELIQVMAELSPAAKTGKRKRSQMLFRGRRASQ

SEQ ID NO: 708 - protein, 146 aa, Homo sapiens
  IFNG_E41N
CYCQDPYVKEAENLKKYFNAGHSDVADNGTLFLGILKNWKNESDRKIMQSQIVSFYFKLFKNFKDDQSIQKSVETIKEDMNVKFFNSNKKKRDDFEKLTNYSVTDLNVQRKAIHELIQVMAELSPAAKTGKRKRSQMLFRGRRASQ

SEQ ID NO: 709 - protein, 146 aa, Homo sapiens
  IFNG_E41Q
CYCQDPYVKEAENLKKYFNAGHSDVADNGTLFLGILKNWKQESDRKIMQSQIVSFYFKLFKNFKDDQSIQKSVETIKEDMNVKFFNSNKKKRDDFEKLTNYSVTDLNVQRKAIHELIQVMAELSPAAKTGKRKRSQMLFRGRRASQ

SEQ ID NO: 710 - protein, 146 aa, Homo sapiens
  IFNG_E41H
CYCQDPYVKEAENLKKYFNAGHSDVADNGTLFLGILKNWKHESDRKIMQSQIVSFYFKLFKNFKDDQSIQKSVETIKEDMNVKFFNSNKKKRDDFEKLTNYSVTDLNVQRKAIHELIQVMAELSPAAKTGKRKRSQMLFRGRRASQ

SEQ ID NO: 711 - protein, 146 aa, Homo sapiens
  IFNG_E42N
CYCQDPYVKEAENLKKYFNAGHSDVADNGTLFLGILKNWKENSDRKIMQSQIVSFYFKLFKNFKDDQSIQKSVETIKEDMNVKFFNSNKKKRDDFEKLTNYSVTDLNVQRKAIHELIQVMAELSPAAKTGKRKRSQMLFRGRRASQ

SEQ ID NO: 712 - protein, 146 aa, Homo sapiens
  IFNG_E42Q
CYCQDPYVKEAENLKKYFNAGHSDVADNGTLFLGILKNWKEQSDRKIMQSQIVSFYFKLFKNFKDDQSIQKSVETIKEDMNVKFFNSNKKKRDDFEKLTNYSVTDLNVQRKAIHELIQVMAELSPAAKTGKRKRSQMLFRGRRASQ

SEQ ID NO: 713 - protein, 146 aa, Homo sapiens
  IFNG_E42H
CYCQDPYVKEAENLKKYFNAGHSDVADNGTLFLGILKNWKEHSDRKIMQSQIVSFYFKLFKNFKDDQSIQKSVETIKEDMNVKFFNSNKKKRDDFEKLTNYSVTDLNVQRKAIHELIQVMAELSPAAKTGKRKRSQMLFRGRRASQ

SEQ ID NO: 714 - protein, 146 aa, Homo sapiens
  IFNG_D44N
CYCQDPYVKEAENLKKYFNAGHSDVADNGTLFLGILKNWKEESNRKIMQSQIVSFYFKLFKNFKDDQSIQKSVETIKEDMNVKFFNSNKKKRDDFEKLTNYSVTDLNVQRKAIHELIQVMAELSPAAKTGKRKRSQMLFRGRRASQ

SEQ ID NO: 715 - protein, 146 aa, Homo sapiens
  IFNG_D44Q
CYCQDPYVKEAENLKKYFNAGHSDVADNGTLFLGILKNWKEESQRKIMQSQIVSFYFKLFKNFKDDQSIQKSVETIKEDMNVKFFNSNKKKRDDFEKLTNYSVTDLNVQRKAIHELIQVMAELSPAAKTGKRKRSQMLFRGRRASQ

SEQ ID NO: 716 - protein, 146 aa, Homo sapiens
  IFNG_R45H
CYCQDPYVKEAENLKKYFNAGHSDVADNGTLFLGILKNWKEESDHKIMQSQIVSFYFKLFKNFKDDQSIQKSVETIKEDMNVKFFNSNKKKRDDFEKLTNYSVTDLNVQRKAIHELIQVMAELSPAAKTGKRKRSQMLFRGRRASQ

SEQ ID NO: 717 - protein, 146 aa, Homo sapiens
  IFNG_R45Q
CYCQDPYVKEAENLKKYFNAGHSDVADNGTLFLGILKNWKEESDQKIMQSQIVSFYFKLFKNFKDDQSIQKSVETIKEDMNVKFFNSNKKKRDDFEKLTNYSVTDLNVQRKAIHELIQVMAELSPAAKTGKRKRSQMLFRGRRASQ

SEQ ID NO: 718 - protein, 146 aa, Homo sapiens
  IFNG_F57I
CYCQDPYVKEAENLKKYFNAGHSDVADNGTLFLGILKNWKEESDRKIMQSQIVSFYIKLFKNFKDDQSIQKSVETIKEDMNVKFFNSNKKKRDDFEKLTNYSVTDLNVQRKAIHELIQVMAELSPAAKTGKRKRSQMLFRGRRASQ

SEQ ID NO: 719 - protein, 146 aa, Homo sapiens
  IFNG_F57V
CYCQDPYVKEAENLKKYFNAGHSDVADNGTLFLGILKNWKEESDRKIMQSQIVSFYVKLFKNFKDDQSIQKSVETIKEDMNVKFFNSNKKKRDDFEKLTNYSVTDLNVQRKAIHELIQVMAELSPAAKTGKRKRSQMLFRGRRASQ

SEQ ID NO: 720 - protein, 146 aa, Homo sapiens
  IFNG_K58N
CYCQDPYVKEAENLKKYFNAGHSDVADNGTLFLGILKNWKEESDRKIMQSQIVSFYFNLFKNFKDDQSIQKSVETIKEDMNVKFFNSNKKKRDDFEKLTNYSVTDLNVQRKAIHELIQVMAELSPAAKTGKRKRSQMLFRGRRASQ

SEQ ID NO: 721 - protein, 146 aa, Homo sapiens
  IFNG_K58Q
CYCQDPYVKEAENLKKYFNAGHSDVADNGTLFLGILKNWKEESDRKIMQSQIVSFYFQLFKNFKDDQSIQKSVETIKEDMNVKFFNSNKKKRDDFEKLTNYSVTDLNVQRKAIHELIQVMAELSPAAKTGKRKRSQMLFRGRRASQ

SEQ ID NO: 722 - protein, 146 aa, Homo sapiens
  IFNG_L59I
CYCQDPYVKEAENLKKYFNAGHSDVADNGTLFLGILKNWKEESDRKIMQSQIVSFYFKIFKNFKDDQSIQKSVETIKEDMNVKFFNSNKKKRDDFEKLTNYSVTDLNVQRKAIHELIQVMAELSPAAKTGKRKRSQMLFRGRRASQ

SEQ ID NO: 723 - protein, 146 aa, Homo sapiens
  IFNG_L59V
CYCQDPYVKEAENLKKYFNAGHSDVADNGTLFLGILKNWKEESDRKIMQSQIVSFYFKVFKNFKDDQSIQKSVETIKEDMNVKFFNSNKKKRDDFEKLTNYSVTDLNVQRKAIHELIQVMAELSPAAKTGKRKRSQMLFRGRRASQ

SEQ ID NO: 724 - protein, 146 aa, Homo sapiens
  IFNG_F60I
CYCQDPYVKEAENLKKYFNAGHSDVADNGTLFLGILKNWKEESDRKIMQSQIVSFYFKLIKNFKDDQSIQKSVETIKEDMNVKFFNSNKKKRDDFEKLTNYSVTDLNVQRKAIHELIQVMAELSPAAKTGKRKRSQMLFRGRRASQ

SEQ ID NO: 725 - protein, 146 aa, Homo sapiens
  IFNG_F60V
CYCQDPYVKEAENLKKYFNAGHSDVADNGTLFLGILKNWKEESDRKIMQSQIVSFYFKLVKNFKDDQSIQKSVETIKEDMNVKFFNSNKKKRDDFEKLTNYSVTDLNVQRKAIHELIQVMAELSPAAKTGKRKRSQMLFRGRRASQ

SEQ ID NO: 726 - protein, 146 aa, Homo sapiens
  IFNG_K61N
CYCQDPYVKEAENLKKYFNAGHSDVADNGTLFLGILKNWKEESDRKIMQSQIVSFYFKLFNNFKDDQSIQKSVETIKEDMNVKFFNSNKKKRDDFEKLTNYSVTDLNVQRKAIHELIQVMAELSPAAKTGKRKRSQMLFRGRRASQ

SEQ ID NO: 727 - protein, 146 aa, Homo sapiens
  IFNG_K61Q
CYCQDPYVKEAENLKKYFNAGHSDVADNGTLFLGILKNWKEESDRKIMQSQIVSFYFKLFQNFKDDQSIQKSVETIKEDMNVKFFNSNKKKRDDFEKLTNYSVTDLNVQRKAIHELIQVMAELSPAAKTGKRKRSQMLFRGRRASQ

SEQ ID NO: 728 - protein, 146 aa, Homo sapiens
  IFNG_F63I
CYCQDPYVKEAENLKKYFNAGHSDVADNGTLFLGILKNWKEESDRKIMQSQIVSFYFKLFKNIKDDQSIQKSVETIKEDMNVKFFNSNKKKRDDFEKLTNYSVTDLNVQRKAIHELIQVMAELSPAAKTGKRKRSQMLFRGRRASQ

SEQ ID NO: 729 - protein, 146 aa, Homo sapiens
  IFNG_F63V
CYCQDPYVKEAENLKKYFNAGHSDVADNGTLFLGILKNWKEESDRKIMQSQIVSFYFKLFKNVKDDQSIQKSVETIKEDMNVKFFNSNKKKRDDFEKLTNYSVTDLNVQRKAIHELIQVMAELSPAAKTGKRKRSQMLFRGRRASQ

SEQ ID NO: 730 - protein, 146 aa, Homo sapiens
  IFNG_K64N
CYCQDPYVKEAENLKKYFNAGHSDVADNGTLFLGILKNWKEESDRKIMQSQIVSFYFKLFKNFNDDQSIQKSVETIKEDMNVKFFNSNKKKRDDFEKLTNYSVTDLNVQRKAIHELIQVMAELSPAAKTGKRKRSQMLFRGRRASQ

SEQ ID NO: 731 - protein, 146 aa, Homo sapiens
  IFNG_K64Q
CYCQDPYVKEAENLKKYFNAGHSDVADNGTLFLGILKNWKEESDRKIMQSQIVSFYFKLFKNFQDDQSIQKSVETIKEDMNVKFFNSNKKKRDDFEKLTNYSVTDLNVQRKAIHELIQVMAELSPAAKTGKRKRSQMLFRGRRASQ

SEQ ID NO: 732 - protein, 146 aa, Homo sapiens
  IFNG_D65N
CYCQDPYVKEAENLKKYFNAGHSDVADNGTLFLGILKNWKEESDRKIMQSQIVSFYFKLFKNFKNDQSIQKSVETIKEDMNVKFFNSNKKKRDDFEKLTNYSVTDLNVQRKAIHELIQVMAELSPAAKTGKRKRSQMLFRGRRASQ

SEQ ID NO: 733 - protein, 146 aa, Homo sapiens
  IFNG_D65Q
CYCQDPYVKEAENLKKYFNAGHSDVADNGTLFLGILKNWKEESDRKIMQSQIVSFYFKLFKNFKQDQSIQKSVETIKEDMNVKFFNSNKKKRDDFEKLTNYSVTDLNVQRKAIHELIQVMAELSPAAKTGKRKRSQMLFRGRRASQ

SEQ ID NO: 734 - protein, 146 aa, Homo sapiens
  IFNG_D66N
CYCQDPYVKEAENLKKYFNAGHSDVADNGTLFLGILKNWKEESDRKIMQSQIVSFYFKLFKNFKDNQSIQKSVETIKEDMNVKFFNSNKKKRDDFEKLTNYSVTDLNVQRKAIHELIQVMAELSPAAKTGKRKRSQMLFRGRRASQ

SEQ ID NO: 735 - protein, 146 aa, Homo sapiens
  IFNG_D66Q
CYCQDPYVKEAENLKKYFNAGHSDVADNGTLFLGILKNWKEESDRKIMQSQIVSFYFKLFKNFKDQQSIQKSVETIKEDMNVKFFNSNKKKRDDFEKLTNYSVTDLNVQRKAIHELIQVMAELSPAAKTGKRKRSQMLFRGRRASQ

SEQ ID NO: 736 - protein, 146 aa, Homo sapiens
  IFNG_K71N
CYCQDPYVKEAENLKKYFNAGHSDVADNGTLFLGILKNWKEESDRKIMQSQIVSFYFKLFKNFKDDQSIQNSVETIKEDMNVKFFNSNKKKRDDFEKLTNYSVTDLNVQRKAIHELIQVMAELSPAAKTGKRKRSQMLFRGRRASQ

SEQ ID NO: 737 - protein, 146 aa, Homo sapiens
  IFNG_K71Q
CYCQDPYVKEAENLKKYFNAGHSDVADNGTLFLGILKNWKEESDRKIMQSQIVSFYFKLFKNFKDDQSIQQSVETIKEDMNVKFFNSNKKKRDDFEKLTNYSVTDLNVQRKAIHELIQVMAELSPAAKTGKRKRSQMLFRGRRASQ

SEQ ID NO: 738 - protein, 146 aa, Homo sapiens
  IFNG_E74N
CYCQDPYVKEAENLKKYFNAGHSDVADNGTLFLGILKNWKEESDRKIMQSQIVSFYFKLFKNFKDDQSIQKSVNTIKEDMNVKFFNSNKKKRDDFEKLTNYSVTDLNVQRKAIHELIQVMAELSPAAKTGKRKRSQMLFRGRRASQ

SEQ ID NO: 739 - protein, 146 aa, Homo sapiens
  IFNG_E74Q
CYCQDPYVKEAENLKKYFNAGHSDVADNGTLFLGILKNWKEESDRKIMQSQIVSFYFKLFKNFKDDQSIQKSVQTIKEDMNVKFFNSNKKKRDDFEKLTNYSVTDLNVQRKAIHELIQVMAELSPAAKTGKRKRSQMLFRGRRASQ

SEQ ID NO: 740 - protein, 146 aa, Homo sapiens
  IFNG_E74H
CYCQDPYVKEAENLKKYFNAGHSDVADNGTLFLGILKNWKEESDRKIMQSQIVSFYFKLFKNFKDDQSIQKSVHTIKEDMNVKFFNSNKKKRDDFEKLTNYSVTDLNVQRKAIHELIQVMAELSPAAKTGKRKRSQMLFRGRRASQ

SEQ ID NO: 741 - protein, 146 aa, Homo sapiens
  IFNG_K77N
CYCQDPYVKEAENLKKYFNAGHSDVADNGTLFLGILKNWKEESDRKIMQSQIVSFYFKLFKNFKDDQSIQKSVETINEDMNVKFFNSNKKKRDDFEKLTNYSVTDLNVQRKAIHELIQVMAELSPAAKTGKRKRSQMLFRGRRASQ

SEQ ID NO: 742 - protein, 146 aa, Homo sapiens
  IFNG_K77Q
CYCQDPYVKEAENLKKYFNAGHSDVADNGTLFLGILKNWKEESDRKIMQSQIVSFYFKLFKNFKDDQSIQKSVETIQEDMNVKFFNSNKKKRDDFEKLTNYSVTDLNVQRKAIHELIQVMAELSPAAKTGKRKRSQMLFRGRRASQ

SEQ ID NO: 743 - protein, 146 aa, Homo sapiens
  IFNG_E78N
CYCQDPYVKEAENLKKYFNAGHSDVADNGTLFLGILKNWKEESDRKIMQSQIVSFYFKLFKNFKDDQSIQKSVETIKNDMNVKFFNSNKKKRDDFEKLTNYSVTDLNVQRKAIHELIQVMAELSPAAKTGKRKRSQMLFRGRRASQ

SEQ ID NO: 744 - protein, 146 aa, Homo sapiens
  IFNG_E78Q
CYCQDPYVKEAENLKKYFNAGHSDVADNGTLFLGILKNWKEESDRKIMQSQIVSFYFKLFKNFKDDQSIQKSVETIKQDMNVKFFNSNKKKRDDFEKLTNYSVTDLNVQRKAIHELIQVMAELSPAAKTGKRKRSQMLFRGRRASQ

SEQ ID NO: 745 - protein, 146 aa, Homo sapiens
  IFNG_E78H
CYCQDPYVKEAENLKKYFNAGHSDVADNGTLFLGILKNWKEESDRKIMQSQIVSFYFKLFKNFKDDQSIQKSVETIKHDMNVKFFNSNKKKRDDFEKLTNYSVTDLNVQRKAIHELIQVMAELSPAAKTGKRKRSQMLFRGRRASQ

SEQ ID NO: 746 - protein, 146 aa, Homo sapiens
  IFNG_D79N
CYCQDPYVKEAENLKKYFNAGHSDVADNGTLFLGILKNWKEESDRKIMQSQIVSFYFKLFKNFKDDQSIQKSVETIKENMNVKFFNSNKKKRDDFEKLTNYSVTDLNVQRKAIHELIQVMAELSPAAKTGKRKRSQMLFRGRRASQ

SEQ ID NO: 747 - protein, 146 aa, Homo sapiens
  IFNG_D79Q
CYCQDPYVKEAENLKKYFNAGHSDVADNGTLFLGILKNWKEESDRKIMQSQIVSFYFKLFKNFKDDQSIQKSVETIKEQMNVKFFNSNKKKRDDFEKLTNYSVTDLNVQRKAIHELIQVMAELSPAAKTGKRKRSQMLFRGRRASQ

SEQ ID NO: 748 - protein, 146 aa, Homo sapiens
  IFNG_K83N
CYCQDPYVKEAENLKKYFNAGHSDVADNGTLFLGILKNWKEESDRKIMQSQIVSFYFKLFKNFKDDQSIQKSVETIKEDMNVNFFNSNKKKRDDFEKLTNYSVTDLNVQRKAIHELIQVMAELSPAAKTGKRKRSQMLFRGRRASQ

SEQ ID NO: 749 - protein, 146 aa, Homo sapiens
  IFNG_K83Q
CYCQDPYVKEAENLKKYFNAGHSDVADNGTLFLGILKNWKEESDRKIMQSQIVSFYFKLFKNFKDDQSIQKSVETIKEDMNVQFFNSNKKKRDDFEKLTNYSVTDLNVQRKAIHELIQVMAELSPAAKTGKRKRSQMLFRGRRASQ

SEQ ID NO: 750 - protein, 146 aa, Homo sapiens
  IFNG_F84I
CYCQDPYVKEAENLKKYFNAGHSDVADNGTLFLGILKNWKEESDRKIMQSQIVSFYFKLFKNFKDDQSIQKSVETIKEDMNVKIFNSNKKKRDDFEKLTNYSVTDLNVQRKAIHELIQVMAELSPAAKTGKRKRSQMLFRGRRASQ

SEQ ID NO: 751 - protein, 146 aa, Homo sapiens
  IFNG_F84V
CYCQDPYVKEAENLKKYFNAGHSDVADNGTLFLGILKNWKEESDRKIMQSQIVSFYFKLFKNFKDDQSIQKSVETIKEDMNVKVFNSNKKKRDDFEKLTNYSVTDLNVQRKAIHELIQVMAELSPAAKTGKRKRSQMLFRGRRASQ

SEQ ID NO: 752 - protein, 146 aa, Homo sapiens
  IFNG_K89N
CYCQDPYVKEAENLKKYFNAGHSDVADNGTLFLGILKNWKEESDRKIMQSQIVSFYFKLFKNFKDDQSIQKSVETIKEDMNVKFFNSNNKKRDDFEKLTNYSVTDLNVQRKAIHELIQVMAELSPAAKTGKRKRSQMLFRGRRASQ

SEQ ID NO: 753 - protein, 146 aa, Homo sapiens
  IFNG_K89Q
CYCQDPYVKEAENLKKYFNAGHSDVADNGTLFLGILKNWKEESDRKIMQSQIVSFYFKLFKNFKDDQSIQKSVETIKEDMNVKFFNSNQKKRDDFEKLTNYSVTDLNVQRKAIHELIQVMAELSPAAKTGKRKRSQMLFRGRRASQ

SEQ ID NO: 754 - protein, 146 aa, Homo sapiens
  IFNG_K90N
CYCQDPYVKEAENLKKYFNAGHSDVADNGTLFLGILKNWKEESDRKIMQSQIVSFYFKLFKNFKDDQSIQKSVETIKEDMNVKFFNSNKNKRDDFEKLTNYSVTDLNVQRKAIHELIQVMAELSPAAKTGKRKRSQMLFRGRRASQ

SEQ ID NO: 755 - protein, 146 aa, Homo sapiens
  IFNG_K90Q
CYCQDPYVKEAENLKKYFNAGHSDVADNGTLFLGILKNWKEESDRKIMQSQIVSFYFKLFKNFKDDQSIQKSVETIKEDMNVKFFNSNKQKRDDFEKLTNYSVTDLNVQRKAIHELIQVMAELSPAAKTGKRKRSQMLFRGRRASQ

SEQ ID NO: 756 - protein, 146 aa, Homo sapiens
  IFNG_K91N
CYCQDPYVKEAENLKKYFNAGHSDVADNGTLFLGILKNWKEESDRKIMQSQIVSFYFKLFKNFKDDQSIQKSVETIKEDMNVKFFNSNKKNRDDFEKLTNYSVTDLNVQRKAIHELIQVMAELSPAAKTGKRKRSQMLFRGRRASQ

SEQ ID NO: 757 - protein, 146 aa, Homo sapiens
  IFNG_K91Q
CYCQDPYVKEAENLKKYFNAGHSDVADNGTLFLGILKNWKEESDRKIMQSQIVSFYFKLFKNFKDDQSIQKSVETIKEDMNVKFFNSNKKQRDDFEKLTNYSVTDLNVQRKAIHELIQVMAELSPAAKTGKRKRSQMLFRGRRASQ

SEQ ID NO: 758 - protein, 146 aa, Homo sapiens
  IFNG_R92H
CYCQDPYVKEAENLKKYFNAGHSDVADNGTLFLGILKNWKEESDRKIMQSQIVSFYFKLFKNFKDDQSIQKSVETIKEDMNVKFFNSNKKKHDDFEKLTNYSVTDLNVQRKAIHELIQVMAELSPAAKTGKRKRSQMLFRGRRASQ

SEQ ID NO: 759 - protein, 146 aa, Homo sapiens
  IFNG_R92Q
CYCQDPYVKEAENLKKYFNAGHSDVADNGTLFLGILKNWKEESDRKIMQSQIVSFYFKLFKNFKDDQSIQKSVETIKEDMNVKFFNSNKKKQDDFEKLTNYSVTDLNVQRKAIHELIQVMAELSPAAKTGKRKRSQMLFRGRRASQ

SEQ ID NO: 760 - protein, 146 aa, Homo sapiens
  IFNG_D93N
CYCQDPYVKEAENLKKYFNAGHSDVADNGTLFLGILKNWKEESDRKIMQSQIVSFYFKLFKNFKDDQSIQKSVETIKEDMNVKFFNSNKKKRNDFEKLTNYSVTDLNVQRKAIHELIQVMAELSPAAKTGKRKRSQMLFRGRRASQ

SEQ ID NO: 761 - protein, 146 aa, Homo sapiens
  IFNG_D93Q
CYCQDPYVKEAENLKKYFNAGHSDVADNGTLFLGILKNWKEESDRKIMQSQIVSFYFKLFKNFKDDQSIQKSVETIKEDMNVKFFNSNKKKRQDFEKLTNYSVTDLNVQRKAIHELIQVMAELSPAAKTGKRKRSQMLFRGRRASQ

SEQ ID NO: 762 - protein, 146 aa, Homo sapiens
  IFNG_D94N
CYCQDPYVKEAENLKKYFNAGHSDVADNGTLFLGILKNWKEESDRKIMQSQIVSFYFKLFKNFKDDQSIQKSVETIKEDMNVKFFNSNKKKRDNFEKLTNYSVTDLNVQRKAIHELIQVMAELSPAAKTGKRKRSQMLFRGRRASQ

SEQ ID NO: 763 - protein, 146 aa, Homo sapiens
  IFNG_D94Q
CYCQDPYVKEAENLKKYFNAGHSDVADNGTLFLGILKNWKEESDRKIMQSQIVSFYFKLFKNFKDDQSIQKSVETIKEDMNVKFFNSNKKKRDQFEKLTNYSVTDLNVQRKAIHELIQVMAELSPAAKTGKRKRSQMLFRGRRASQ

SEQ ID NO: 764 - protein, 146 aa, Homo sapiens
  IFNG_F95I
CYCQDPYVKEAENLKKYFNAGHSDVADNGTLFLGILKNWKEESDRKIMQSQIVSFYFKLFKNFKDDQSIQKSVETIKEDMNVKFFNSNKKKRDDIEKLTNYSVTDLNVQRKAIHELIQVMAELSPAAKTGKRKRSQMLFRGRRASQ

SEQ ID NO: 765 - protein, 146 aa, Homo sapiens
  IFNG_F95V
CYCQDPYVKEAENLKKYFNAGHSDVADNGTLFLGILKNWKEESDRKIMQSQIVSFYFKLFKNFKDDQSIQKSVETIKEDMNVKFFNSNKKKRDDVEKLTNYSVTDLNVQRKAIHELIQVMAELSPAAKTGKRKRSQMLFRGRRASQ

SEQ ID NO: 766 - protein, 146 aa, Homo sapiens
  IFNG_E96N
CYCQDPYVKEAENLKKYFNAGHSDVADNGTLFLGILKNWKEESDRKIMQSQIVSFYFKLFKNFKDDQSIQKSVETIKEDMNVKFFNSNKKKRDDFNKLTNYSVTDLNVQRKAIHELIQVMAELSPAAKTGKRKRSQMLFRGRRASQ

SEQ ID NO: 767 - protein, 146 aa, Homo sapiens
  IFNG_E96Q
CYCQDPYVKEAENLKKYFNAGHSDVADNGTLFLGILKNWKEESDRKIMQSQIVSFYFKLFKNFKDDQSIQKSVETIKEDMNVKFFNSNKKKRDDFQKLTNYSVTDLNVQRKAIHELIQVMAELSPAAKTGKRKRSQMLFRGRRASQ

SEQ ID NO: 768 - protein, 146 aa, Homo sapiens
  IFNG_E96H
CYCQDPYVKEAENLKKYFNAGHSDVADNGTLFLGILKNWKEESDRKIMQSQIVSFYFKLFKNFKDDQSIQKSVETIKEDMNVKFFNSNKKKRDDFHKLTNYSVTDLNVQRKAIHELIQVMAELSPAAKTGKRKRSQMLFRGRRASQ

SEQ ID NO: 769 - protein, 146 aa, Homo sapiens
  IFNG_K97N
CYCQDPYVKEAENLKKYFNAGHSDVADNGTLFLGILKNWKEESDRKIMQSQIVSFYFKLFKNFKDDQSIQKSVETIKEDMNVKFFNSNKKKRDDFENLTNYSVTDLNVQRKAIHELIQVMAELSPAAKTGKRKRSQMLFRGRRASQ

SEQ ID NO: 770 - protein, 146 aa, Homo sapiens
  IFNG_K97Q
CYCQDPYVKEAENLKKYFNAGHSDVADNGTLFLGILKNWKEESDRKIMQSQIVSFYFKLFKNFKDDQSIQKSVETIKEDMNVKFFNSNKKKRDDFEQLTNYSVTDLNVQRKAIHELIQVMAELSPAAKTGKRKRSQMLFRGRRASQ

SEQ ID NO: 771 - protein, 146 aa, Homo sapiens
  IFNG_L98I
CYCQDPYVKEAENLKKYFNAGHSDVADNGTLFLGILKNWKEESDRKIMQSQIVSFYFKLFKNFKDDQSIQKSVETIKEDMNVKFFNSNKKKRDDFEKITNYSVTDLNVQRKAIHELIQVMAELSPAAKTGKRKRSQMLFRGRRASQ

SEQ ID NO: 772 - protein, 146 aa, Homo sapiens
  IFNG_L98V
CYCQDPYVKEAENLKKYFNAGHSDVADNGTLFLGILKNWKEESDRKIMQSQIVSFYFKLFKNFKDDQSIQKSVETIKEDMNVKFFNSNKKKRDDFEKVTNYSVTDLNVQRKAIHELIQVMAELSPAAKTGKRKRSQMLFRGRRASQ

SEQ ID NO: 773 - protein, 146 aa, Homo sapiens
  IFNG_Y101H
CYCQDPYVKEAENLKKYFNAGHSDVADNGTLFLGILKNWKEESDRKIMQSQIVSFYFKLFKNFKDDQSIQKSVETIKEDMNVKFFNSNKKKRDDFEKLTNHSVTDLNVQRKAIHELIQVMAELSPAAKTGKRKRSQMLFRGRRASQ

SEQ ID NO: 774 - protein, 146 aa, Homo sapiens
  IFNG_Y101I
CYCQDPYVKEAENLKKYFNAGHSDVADNGTLFLGILKNWKEESDRKIMQSQIVSFYFKLFKNFKDDQSIQKSVETIKEDMNVKFFNSNKKKRDDFEKLTNISVTDLNVQRKAIHELIQVMAELSPAAKTGKRKRSQMLFRGRRASQ

SEQ ID NO: 775 - protein, 146 aa, Homo sapiens
  IFNG_D105N
CYCQDPYVKEAENLKKYFNAGHSDVADNGTLFLGILKNWKEESDRKIMQSQIVSFYFKLFKNFKDDQSIQKSVETIKEDMNVKFFNSNKKKRDDFEKLTNYSVTNLNVQRKAIHELIQVMAELSPAAKTGKRKRSQMLFRGRRASQ

SEQ ID NO: 776 - protein, 146 aa, Homo sapiens
  IFNG_D105Q
CYCQDPYVKEAENLKKYFNAGHSDVADNGTLFLGILKNWKEESDRKIMQSQIVSFYFKLFKNFKDDQSIQKSVETIKEDMNVKFFNSNKKKRDDFEKLTNYSVTQLNVQRKAIHELIQVMAELSPAAKTGKRKRSQMLFRGRRASQ

SEQ ID NO: 777 - protein, 146 aa, Homo sapiens
  IFNG_L106I
CYCQDPYVKEAENLKKYFNAGHSDVADNGTLFLGILKNWKEESDRKIMQSQIVSFYFKLFKNFKDDQSIQKSVETIKEDMNVKFFNSNKKKRDDFEKLTNYSVTDINVQRKAIHELIQVMAELSPAAKTGKRKRSQMLFRGRRASQ

SEQ ID NO: 778 - protein, 146 aa, Homo sapiens
  IFNG_L106V
CYCQDPYVKEAENLKKYFNAGHSDVADNGTLFLGILKNWKEESDRKIMQSQIVSFYFKLFKNFKDDQSIQKSVETIKEDMNVKFFNSNKKKRDDFEKLTNYSVTDVNVQRKAIHELIQVMAELSPAAKTGKRKRSQMLFRGRRASQ

SEQ ID NO: 779 - protein, 146 aa, Homo sapiens
  IFNG_E115N
CYCQDPYVKEAENLKKYFNAGHSDVADNGTLFLGILKNWKEESDRKIMQSQIVSFYFKLFKNFKDDQSIQKSVETIKEDMNVKFFNSNKKKRDDFEKLTNYSVTDLNVQRKAIHNLIQVMAELSPAAKTGKRKRSQMLFRGRRASQ

SEQ ID NO: 780 - protein, 146 aa, Homo sapiens
  IFNG_E115Q
CYCQDPYVKEAENLKKYFNAGHSDVADNGTLFLGILKNWKEESDRKIMQSQIVSFYFKLFKNFKDDQSIQKSVETIKEDMNVKFFNSNKKKRDDFEKLTNYSVTDLNVQRKAIHQLIQVMAELSPAAKTGKRKRSQMLFRGRRASQ

SEQ ID NO: 781 - protein, 146 aa, Homo sapiens
  IFNG_E115H
CYCQDPYVKEAENLKKYFNAGHSDVADNGTLFLGILKNWKEESDRKIMQSQIVSFYFKLFKNFKDDQSIQKSVETIKEDMNVKFFNSNKKKRDDFEKLTNYSVTDLNVQRKAIHHLIQVMAELSPAAKTGKRKRSQMLFRGRRASQ

SEQ ID NO: 782 - protein, 146 aa, Homo sapiens
  IFNG_E122N
CYCQDPYVKEAENLKKYFNAGHSDVADNGTLFLGILKNWKEESDRKIMQSQIVSFYFKLFKNFKDDQSIQKSVETIKEDMNVKFFNSNKKKRDDFEKLTNYSVTDLNVQRKAIHELIQVMANLSPAAKTGKRKRSQMLFRGRRASQ

SEQ ID NO: 783 - protein, 146 aa, Homo sapiens
  IFNG_E122Q
CYCQDPYVKEAENLKKYFNAGHSDVADNGTLFLGILKNWKEESDRKIMQSQIVSFYFKLFKNFKDDQSIQKSVETIKEDMNVKFFNSNKKKRDDFEKLTNYSVTDLNVQRKAIHELIQVMAQLSPAAKTGKRKRSQMLFRGRRASQ

SEQ ID NO: 784 - protein, 146 aa, Homo sapiens
  IFNG_E122H
CYCQDPYVKEAENLKKYFNAGHSDVADNGTLFLGILKNWKEESDRKIMQSQIVSFYFKLFKNFKDDQSIQKSVETIKEDMNVKFFNSNKKKRDDFEKLTNYSVTDLNVQRKAIHELIQVMAHLSPAAKTGKRKRSQMLFRGRRASQ

SEQ ID NO: 785 - protein, 146 aa, Homo sapiens
  IFNG_L123I
CYCQDPYVKEAENLKKYFNAGHSDVADNGTLFLGILKNWKEESDRKIMQSQIVSFYFKLFKNFKDDQSIQKSVETIKEDMNVKFFNSNKKKRDDFEKLTNYSVTDLNVQRKAIHELIQVMAEISPAAKTGKRKRSQMLFRGRRASQ

SEQ ID NO: 786 - protein, 146 aa, Homo sapiens
  IFNG_L123V
CYCQDPYVKEAENLKKYFNAGHSDVADNGTLFLGILKNWKEESDRKIMQSQIVSFYFKLFKNFKDDQSIQKSVETIKEDMNVKFFNSNKKKRDDFEKLTNYSVTDLNVQRKAIHELIQVMAEVSPAAKTGKRKRSQMLFRGRRASQ

SEQ ID NO: 787 - protein, 146 aa, Homo sapiens
  IFNG_P125A
CYCQDPYVKEAENLKKYFNAGHSDVADNGTLFLGILKNWKEESDRKIMQSQIVSFYFKLFKNFKDDQSIQKSVETIKEDMNVKFFNSNKKKRDDFEKLTNYSVTDLNVQRKAIHELIQVMAELSAAAKTGKRKRSQMLFRGRRASQ

SEQ ID NO: 788 - protein, 146 aa, Homo sapiens
  IFNG_P125S
CYCQDPYVKEAENLKKYFNAGHSDVADNGTLFLGILKNWKEESDRKIMQSQIVSFYFKLFKNFKDDQSIQKSVETIKEDMNVKFFNSNKKKRDDFEKLTNYSVTDLNVQRKAIHELIQVMAELSSAAKTGKRKRSQMLFRGRRASQ

SEQ ID NO: 789 - protein, 146 aa, Homo sapiens
  IFNG_K128N
CYCQDPYVKEAENLKKYFNAGHSDVADNGTLFLGILKNWKEESDRKIMQSQIVSFYFKLFKNFKDDQSIQKSVETIKEDMNVKFFNSNKKKRDDFEKLTNYSVTDLNVQRKAIHELIQVMAELSPAANTGKRKRSQMLFRGRRASQ

SEQ ID NO: 790 - protein, 146 aa, Homo sapiens
  IFNG_K128Q
CYCQDPYVKEAENLKKYFNAGHSDVADNGTLFLGILKNWKEESDRKIMQSQIVSFYFKLFKNFKDDQSIQKSVETIKEDMNVKFFNSNKKKRDDFEKLTNYSVTDLNVQRKAIHELIQVMAELSPAAQTGKRKRSQMLFRGRRASQ

SEQ ID NO: 791 - protein, 146 aa, Homo sapiens
  IFNG_K131N
CYCQDPYVKEAENLKKYFNAGHSDVADNGTLFLGILKNWKEESDRKIMQSQIVSFYFKLFKNFKDDQSIQKSVETIKEDMNVKFFNSNKKKRDDFEKLTNYSVTDLNVQRKAIHELIQVMAELSPAAKTGNRKRSQMLFRGRRASQ

SEQ ID NO: 792 - protein, 146 aa, Homo sapiens
  IFNG_K131Q
CYCQDPYVKEAENLKKYFNAGHSDVADNGTLFLGILKNWKEESDRKIMQSQIVSFYFKLFKNFKDDQSIQKSVETIKEDMNVKFFNSNKKKRDDFEKLTNYSVTDLNVQRKAIHELIQVMAELSPAAKTGQRKRSQMLFRGRRASQ

SEQ ID NO: 793 - protein, 146 aa, Homo sapiens
  IFNG_R132H
CYCQDPYVKEAENLKKYFNAGHSDVADNGTLFLGILKNWKEESDRKIMQSQIVSFYFKLFKNFKDDQSIQKSVETIKEDMNVKFFNSNKKKRDDFEKLTNYSVTDLNVQRKAIHELIQVMAELSPAAKTGKHKRSQMLFRGRRASQ

SEQ ID NO: 794 - protein, 146 aa, Homo sapiens
  IFNG_R132Q
CYCQDPYVKEAENLKKYFNAGHSDVADNGTLFLGILKNWKEESDRKIMQSQIVSFYFKLFKNFKDDQSIQKSVETIKEDMNVKFFNSNKKKRDDFEKLTNYSVTDLNVQRKAIHELIQVMAELSPAAKTGKQKRSQMLFRGRRASQ

SEQ ID NO: 795 - protein, 146 aa, Homo sapiens
  IFNG_K133N
CYCQDPYVKEAENLKKYFNAGHSDVADNGTLFLGILKNWKEESDRKIMQSQIVSFYFKLFKNFKDDQSIQKSVETIKEDMNVKFFNSNKKKRDDFEKLTNYSVTDLNVQRKAIHELIQVMAELSPAAKTGKRNRSQMLFRGRRASQ

SEQ ID NO: 796 - protein, 146 aa, Homo sapiens
  IFNG_K133Q
CYCQDPYVKEAENLKKYFNAGHSDVADNGTLFLGILKNWKEESDRKIMQSQIVSFYFKLFKNFKDDQSIQKSVETIKEDMNVKFFNSNKKKRDDFEKLTNYSVTDLNVQRKAIHELIQVMAELSPAAKTGKRQRSQMLFRGRRASQ

SEQ ID NO: 797 - protein, 146 aa, Homo sapiens
  IFNG_R134H
CYCQDPYVKEAENLKKYFNAGHSDVADNGTLFLGILKNWKEESDRKIMQSQIVSFYFKLFKNFKDDQSIQKSVETIKEDMNVKFFNSNKKKRDDFEKLTNYSVTDLNVQRKAIHELIQVMAELSPAAKTGKRKHSQMLFRGRRASQ

SEQ ID NO: 798 - protein, 146 aa, Homo sapiens
  IFNG_R134Q
CYCQDPYVKEAENLKKYFNAGHSDVADNGTLFLGILKNWKEESDRKIMQSQIVSFYFKLFKNFKDDQSIQKSVETIKEDMNVKFFNSNKKKRDDFEKLTNYSVTDLNVQRKAIHELIQVMAELSPAAKTGKRKQSQMLFRGRRASQ

SEQ ID NO: 799 - protein, 146 aa, Homo sapiens
  IFNG_M137I
CYCQDPYVKEAENLKKYFNAGHSDVADNGTLFLGILKNWKEESDRKIMQSQIVSFYFKLFKNFKDDQSIQKSVETIKEDMNVKFFNSNKKKRDDFEKLTNYSVTDLNVQRKAIHELIQVMAELSPAAKTGKRKRSQILFRGRRASQ

SEQ ID NO: 800 - protein, 146 aa, Homo sapiens
  IFNG_M137V
CYCQDPYVKEAENLKKYFNAGHSDVADNGTLFLGILKNWKEESDRKIMQSQIVSFYFKLFKNFKDDQSIQKSVETIKEDMNVKFFNSNKKKRDDFEKLTNYSVTDLNVQRKAIHELIQVMAELSPAAKTGKRKRSQVLFRGRRASQ

SEQ ID NO: 801 - protein, 146 aa, Homo sapiens
  IFNG_L138I
CYCQDPYVKEAENLKKYFNAGHSDVADNGTLFLGILKNWKEESDRKIMQSQIVSFYFKLFKNFKDDQSIQKSVETIKEDMNVKFFNSNKKKRDDFEKLTNYSVTDLNVQRKAIHELIQVMAELSPAAKTGKRKRSQMIFRGRRASQ

SEQ ID NO: 802 - protein, 146 aa, Homo sapiens
  IFNG_L138V
CYCQDPYVKEAENLKKYFNAGHSDVADNGTLFLGILKNWKEESDRKIMQSQIVSFYFKLFKNFKDDQSIQKSVETIKEDMNVKFFNSNKKKRDDFEKLTNYSVTDLNVQRKAIHELIQVMAELSPAAKTGKRKRSQMVFRGRRASQ

SEQ ID NO: 803 - protein, 146 aa, Homo sapiens
  IFNG_F139I
CYCQDPYVKEAENLKKYFNAGHSDVADNGTLFLGILKNWKEESDRKIMQSQIVSFYFKLFKNFKDDQSIQKSVETIKEDMNVKFFNSNKKKRDDFEKLTNYSVTDLNVQRKAIHELIQVMAELSPAAKTGKRKRSQMLIRGRRASQ

SEQ ID NO: 804 - protein, 146 aa, Homo sapiens
  IFNG_F139V
CYCQDPYVKEAENLKKYFNAGHSDVADNGTLFLGILKNWKEESDRKIMQSQIVSFYFKLFKNFKDDQSIQKSVETIKEDMNVKFFNSNKKKRDDFEKLTNYSVTDLNVQRKAIHELIQVMAELSPAAKTGKRKRSQMLVRGRRASQ

SEQ ID NO: 805 - protein, 146 aa, Homo sapiens
  IFNG_R142H
CYCQDPYVKEAENLKKYFNAGHSDVADNGTLFLGILKNWKEESDRKIMQSQIVSFYFKLFKNFKDDQSIQKSVETIKEDMNVKFFNSNKKKRDDFEKLTNYSVTDLNVQRKAIHELIQVMAELSPAAKTGKRKRSQMLFRGHRASQ

SEQ ID NO: 806 - protein, 146 aa, Homo sapiens
  IFNG_R142Q
CYCQDPYVKEAENLKKYFNAGHSDVADNGTLFLGILKNWKEESDRKIMQSQIVSFYFKLFKNFKDDQSIQKSVETIKEDMNVKFFNSNKKKRDDFEKLTNYSVTDLNVQRKAIHELIQVMAELSPAAKTGKRKRSQMLFRGQRASQ

SEQ ID NO: 807 - protein, 146 aa, Homo sapiens
  IFNG_R143H
CYCQDPYVKEAENLKKYFNAGHSDVADNGTLFLGILKNWKEESDRKIMQSQIVSFYFKLFKNFKDDQSIQKSVETIKEDMNVKFFNSNKKKRDDFEKLTNYSVTDLNVQRKAIHELIQVMAELSPAAKTGKRKRSQMLFRGRHASQ

SEQ ID NO: 808 - protein, 146 aa, Homo sapiens
  IFNG_R143Q
CYCQDPYVKEAENLKKYFNAGHSDVADNGTLFLGILKNWKEESDRKIMQSQIVSFYFKLFKNFKDDQSIQKSVETIKEDMNVKFFNSNKKKRDDFEKLTNYSVTDLNVQRKAIHELIQVMAELSPAAKTGKRKRSQMLFRGRQASQ

SEQ ID NO: 809 - protein, 160 aa, Homo sapiens
  IL10_WT
SPGQGTQSENSCTHFPGNLPNMLRDLRDAFSRVKTFFQMKDQLDNLLLKESLLEDFKGYLGCQALSEMIQFYLEEVMPQAENQDPDIKAHVNSLGENLKTLRLRLRRCHRFLPCENKSKAVEQVKNAFNKLQEKGIYKAMSEFDIFINYIEAYMTMKIRN

SEQ ID NO: 810 - protein, 160 aa, Homo sapiens
  IL10_K49N
SPGQGTQSENSCTHFPGNLPNMLRDLRDAFSRVKTFFQMKDQLDNLLLNESLLEDFKGYLGCQALSEMIQFYLEEVMPQAENQDPDIKAHVNSLGENLKTLRLRLRRCHRFLPCENKSKAVEQVKNAFNKLQEKGIYKAMSEFDIFINYIEAYMTMKIRN

SEQ ID NO: 811 - protein, 160 aa, Homo sapiens
  IL10_K49Q
SPGQGTQSENSCTHFPGNLPNMLRDLRDAFSRVKTFFQMKDQLDNLLLQESLLEDFKGYLGCQALSEMIQFYLEEVMPQAENQDPDIKAHVNSLGENLKTLRLRLRRCHRFLPCENKSKAVEQVKNAFNKLQEKGIYKAMSEFDIFINYIEAYMTMKIRN

SEQ ID NO: 812 - protein, 160 aa, Homo sapiens
  IL10_E50N
SPGQGTQSENSCTHFPGNLPNMLRDLRDAFSRVKTFFQMKDQLDNLLLKNSLLEDFKGYLGCQALSEMIQFYLEEVMPQAENQDPDIKAHVNSLGENLKTLRLRLRRCHRFLPCENKSKAVEQVKNAFNKLQEKGIYKAMSEFDIFINYIEAYMTMKIRN

SEQ ID NO: 813 - protein, 160 aa, Homo sapiens
  IL10_E50Q
SPGQGTQSENSCTHFPGNLPNMLRDLRDAFSRVKTFFQMKDQLDNLLLKQSLLEDFKGYLGCQALSEMIQFYLEEVMPQAENQDPDIKAHVNSLGENLKTLRLRLRRCHRFLPCENKSKAVEQVKNAFNKLQEKGIYKAMSEFDIFINYIEAYMTMKIRN

SEQ ID NO: 814 - protein, 160 aa, Homo sapiens
  IL10_E50H
SPGQGTQSENSCTHFPGNLPNMLRDLRDAFSRVKTFFQMKDQLDNLLLKHSLLEDFKGYLGCQALSEMIQFYLEEVMPQAENQDPDIKAHVNSLGENLKTLRLRLRRCHRFLPCENKSKAVEQVKNAFNKLQEKGIYKAMSEFDIFINYIEAYMTMKIRN

SEQ ID NO: 815 - protein, 160 aa, Homo sapiens
  IL10_L52I
SPGQGTQSENSCTHFPGNLPNMLRDLRDAFSRVKTFFQMKDQLDNLLLKESILEDFKGYLGCQALSEMIQFYLEEVMPQAENQDPDIKAHVNSLGENLKTLRLRLRRCHRFLPCENKSKAVEQVKNAFNKLQEKGIYKAMSEFDIFINYIEAYMTMKIRN

SEQ ID NO: 816 - protein, 160 aa, Homo sapiens
  IL10_L52V
SPGQGTQSENSCTHFPGNLPNMLRDLRDAFSRVKTFFQMKDQLDNLLLKESVLEDFKGYLGCQALSEMIQFYLEEVMPQAENQDPDIKAHVNSLGENLKTLRLRLRRCHRFLPCENKSKAVEQVKNAFNKLQEKGIYKAMSEFDIFINYIEAYMTMKIRN

SEQ ID NO: 817 - protein, 160 aa, Homo sapiens
  IL10_L53I
SPGQGTQSENSCTHFPGNLPNMLRDLRDAFSRVKTFFQMKDQLDNLLLKESLIEDFKGYLGCQALSEMIQFYLEEVMPQAENQDPDIKAHVNSLGENLKTLRLRLRRCHRFLPCENKSKAVEQVKNAFNKLQEKGIYKAMSEFDIFINYIEAYMTMKIRN

SEQ ID NO: 818 - protein, 160 aa, Homo sapiens
  IL10_L53V
SPGQGTQSENSCTHFPGNLPNMLRDLRDAFSRVKTFFQMKDQLDNLLLKESLVEDFKGYLGCQALSEMIQFYLEEVMPQAENQDPDIKAHVNSLGENLKTLRLRLRRCHRFLPCENKSKAVEQVKNAFNKLQEKGIYKAMSEFDIFINYIEAYMTMKIRN

SEQ ID NO: 819 - protein, 160 aa, Homo sapiens
  IL10_E54N
SPGQGTQSENSCTHFPGNLPNMLRDLRDAFSRVKTFFQMKDQLDNLLLKESLLNDFKGYLGCQALSEMIQFYLEEVMPQAENQDPDIKAHVNSLGENLKTLRLRLRRCHRFLPCENKSKAVEQVKNAFNKLQEKGIYKAMSEFDIFINYIEAYMTMKIRN

SEQ ID NO: 820 - protein, 160 aa, Homo sapiens
  IL10_E54Q
SPGQGTQSENSCTHFPGNLPNMLRDLRDAFSRVKTFFQMKDQLDNLLLKESLLQDFKGYLGCQALSEMIQFYLEEVMPQAENQDPDIKAHVNSLGENLKTLRLRLRRCHRFLPCENKSKAVEQVKNAFNKLQEKGIYKAMSEFDIFINYIEAYMTMKIRN

SEQ ID NO: 821 - protein, 160 aa, Homo sapiens
  IL10_E54H
SPGQGTQSENSCTHFPGNLPNMLRDLRDAFSRVKTFFQMKDQLDNLLLKESLLHDFKGYLGCQALSEMIQFYLEEVMPQAENQDPDIKAHVNSLGENLKTLRLRLRRCHRFLPCENKSKAVEQVKNAFNKLQEKGIYKAMSEFDIFINYIEAYMTMKIRN

SEQ ID NO: 822 - protein, 160 aa, Homo sapiens
  IL10_D55N
SPGQGTQSENSCTHFPGNLPNMLRDLRDAFSRVKTFFQMKDQLDNLLLKESLLENFKGYLGCQALSEMIQFYLEEVMPQAENQDPDIKAHVNSLGENLKTLRLRLRRCHRFLPCENKSKAVEQVKNAFNKLQEKGIYKAMSEFDIFINYIEAYMTMKIRN

SEQ ID NO: 823 - protein, 160 aa, Homo sapiens
  IL10_D55Q
SPGQGTQSENSCTHFPGNLPNMLRDLRDAFSRVKTFFQMKDQLDNLLLKESLLEQFKGYLGCQALSEMIQFYLEEVMPQAENQDPDIKAHVNSLGENLKTLRLRLRRCHRFLPCENKSKAVEQVKNAFNKLQEKGIYKAMSEFDIFINYIEAYMTMKIRN

SEQ ID NO: 824 - protein, 160 aa, Homo sapiens
  IL10_F56I
SPGQGTQSENSCTHFPGNLPNMLRDLRDAFSRVKTFFQMKDQLDNLLLKESLLEDIKGYLGCQALSEMIQFYLEEVMPQAENQDPDIKAHVNSLGENLKTLRLRLRRCHRFLPCENKSKAVEQVKNAFNKLQEKGIYKAMSEFDIFINYIEAYMTMKIRN

SEQ ID NO: 825 - protein, 160 aa, Homo sapiens
  IL10_F56V
SPGQGTQSENSCTHFPGNLPNMLRDLRDAFSRVKTFFQMKDQLDNLLLKESLLEDVKGYLGCQALSEMIQFYLEEVMPQAENQDPDIKAHVNSLGENLKTLRLRLRRCHRFLPCENKSKAVEQVKNAFNKLQEKGIYKAMSEFDIFINYIEAYMTMKIRN

SEQ ID NO: 826 - protein, 160 aa, Homo sapiens
  IL10_K57N
SPGQGTQSENSCTHFPGNLPNMLRDLRDAFSRVKTFFQMKDQLDNLLLKESLLEDFNGYLGCQALSEMIQFYLEEVMPQAENQDPDIKAHVNSLGENLKTLRLRLRRCHRFLPCENKSKAVEQVKNAFNKLQEKGIYKAMSEFDIFINYIEAYMTMKIRN

SEQ ID NO: 827 - protein, 160 aa, Homo sapiens
  IL10_K57Q
SPGQGTQSENSCTHFPGNLPNMLRDLRDAFSRVKTFFQMKDQLDNLLLKESLLEDFQGYLGCQALSEMIQFYLEEVMPQAENQDPDIKAHVNSLGENLKTLRLRLRRCHRFLPCENKSKAVEQVKNAFNKLQEKGIYKAMSEFDIFINYIEAYMTMKIRN

SEQ ID NO: 828 - protein, 160 aa, Homo sapiens
  IL10_Y59H
SPGQGTQSENSCTHFPGNLPNMLRDLRDAFSRVKTFFQMKDQLDNLLLKESLLEDFKGHLGCQALSEMIQFYLEEVMPQAENQDPDIKAHVNSLGENLKTLRLRLRRCHRFLPCENKSKAVEQVKNAFNKLQEKGIYKAMSEFDIFINYIEAYMTMKIRN

SEQ ID NO: 829 - protein, 160 aa, Homo sapiens
  IL10_Y59I
SPGQGTQSENSCTHFPGNLPNMLRDLRDAFSRVKTFFQMKDQLDNLLLKESLLEDFKGILGCQALSEMIQFYLEEVMPQAENQDPDIKAHVNSLGENLKTLRLRLRRCHRFLPCENKSKAVEQVKNAFNKLQEKGIYKAMSEFDIFINYIEAYMTMKIRN

SEQ ID NO: 830 - protein, 160 aa, Homo sapiens
  IL10_L60I
SPGQGTQSENSCTHFPGNLPNMLRDLRDAFSRVKTFFQMKDQLDNLLLKESLLEDFKGYIGCQALSEMIQFYLEEVMPQAENQDPDIKAHVNSLGENLKTLRLRLRRCHRFLPCENKSKAVEQVKNAFNKLQEKGIYKAMSEFDIFINYIEAYMTMKIRN

SEQ ID NO: 831 - protein, 160 aa, Homo sapiens
  IL10_L60V
SPGQGTQSENSCTHFPGNLPNMLRDLRDAFSRVKTFFQMKDQLDNLLLKESLLEDFKGYVGCQALSEMIQFYLEEVMPQAENQDPDIKAHVNSLGENLKTLRLRLRRCHRFLPCENKSKAVEQVKNAFNKLQEKGIYKAMSEFDIFINYIEAYMTMKIRN

SEQ ID NO: 832 - protein, 160 aa, Homo sapiens
  IL10_E67N
SPGQGTQSENSCTHFPGNLPNMLRDLRDAFSRVKTFFQMKDQLDNLLLKESLLEDFKGYLGCQALSNMIQFYLEEVMPQAENQDPDIKAHVNSLGENLKTLRLRLRRCHRFLPCENKSKAVEQVKNAFNKLQEKGIYKAMSEFDIFINYIEAYMTMKIRN

SEQ ID NO: 833 - protein, 160 aa, Homo sapiens
  IL10_E67Q
SPGQGTQSENSCTHFPGNLPNMLRDLRDAFSRVKTFFQMKDQLDNLLLKESLLEDFKGYLGCQALSQMIQFYLEEVMPQAENQDPDIKAHVNSLGENLKTLRLRLRRCHRFLPCENKSKAVEQVKNAFNKLQEKGIYKAMSEFDIFINYIEAYMTMKIRN

SEQ ID NO: 834 - protein, 160 aa, Homo sapiens
  IL10_E67H
SPGQGTQSENSCTHFPGNLPNMLRDLRDAFSRVKTFFQMKDQLDNLLLKESLLEDFKGYLGCQALSHMIQFYLEEVMPQAENQDPDIKAHVNSLGENLKTLRLRLRRCHRFLPCENKSKAVEQVKNAFNKLQEKGIYKAMSEFDIFINYIEAYMTMKIRN

SEQ ID NO: 835 - protein, 160 aa, Homo sapiens
  IL10_M68I
SPGQGTQSENSCTHFPGNLPNMLRDLRDAFSRVKTFFQMKDQLDNLLLKESLLEDFKGYLGCQALSEIIQFYLEEVMPQAENQDPDIKAHVNSLGENLKTLRLRLRRCHRFLPCENKSKAVEQVKNAFNKLQEKGIYKAMSEFDIFINYIEAYMTMKIRN

SEQ ID NO: 836 - protein, 160 aa, Homo sapiens
  IL10_M68V
SPGQGTQSENSCTHFPGNLPNMLRDLRDAFSRVKTFFQMKDQLDNLLLKESLLEDFKGYLGCQALSEVIQFYLEEVMPQAENQDPDIKAHVNSLGENLKTLRLRLRRCHRFLPCENKSKAVEQVKNAFNKLQEKGIYKAMSEFDIFINYIEAYMTMKIRN

SEQ ID NO: 837 - protein, 160 aa, Homo sapiens
  IL10_F71I
SPGQGTQSENSCTHFPGNLPNMLRDLRDAFSRVKTFFQMKDQLDNLLLKESLLEDFKGYLGCQALSEMIQIYLEEVMPQAENQDPDIKAHVNSLGENLKTLRLRLRRCHRFLPCENKSKAVEQVKNAFNKLQEKGIYKAMSEFDIFINYIEAYMTMKIRN

SEQ ID NO: 838 - protein, 160 aa, Homo sapiens
  IL10_F71V
SPGQGTQSENSCTHFPGNLPNMLRDLRDAFSRVKTFFQMKDQLDNLLLKESLLEDFKGYLGCQALSEMIQVYLEEVMPQAENQDPDIKAHVNSLGENLKTLRLRLRRCHRFLPCENKSKAVEQVKNAFNKLQEKGIYKAMSEFDIFINYIEAYMTMKIRN

SEQ ID NO: 839 - protein, 160 aa, Homo sapiens
  IL10_Y72H
SPGQGTQSENSCTHFPGNLPNMLRDLRDAFSRVKTFFQMKDQLDNLLLKESLLEDFKGYLGCQALSEMIQFHLEEVMPQAENQDPDIKAHVNSLGENLKTLRLRLRRCHRFLPCENKSKAVEQVKNAFNKLQEKGIYKAMSEFDIFINYIEAYMTMKIRN

SEQ ID NO: 840 - protein, 160 aa, Homo sapiens
  IL10_Y72I
SPGQGTQSENSCTHFPGNLPNMLRDLRDAFSRVKTFFQMKDQLDNLLLKESLLEDFKGYLGCQALSEMIQFILEEVMPQAENQDPDIKAHVNSLGENLKTLRLRLRRCHRFLPCENKSKAVEQVKNAFNKLQEKGIYKAMSEFDIFINYIEAYMTMKIRN

SEQ ID NO: 841 - protein, 160 aa, Homo sapiens
  IL10_E74N
SPGQGTQSENSCTHFPGNLPNMLRDLRDAFSRVKTFFQMKDQLDNLLLKESLLEDFKGYLGCQALSEMIQFYLNEVMPQAENQDPDIKAHVNSLGENLKTLRLRLRRCHRFLPCENKSKAVEQVKNAFNKLQEKGIYKAMSEFDIFINYIEAYMTMKIRN

SEQ ID NO: 842 - protein, 160 aa, Homo sapiens
  IL10_E74Q
SPGQGTQSENSCTHFPGNLPNMLRDLRDAFSRVKTFFQMKDQLDNLLLKESLLEDFKGYLGCQALSEMIQFYLQEVMPQAENQDPDIKAHVNSLGENLKTLRLRLRRCHRFLPCENKSKAVEQVKNAFNKLQEKGIYKAMSEFDIFINYIEAYMTMKIRN

SEQ ID NO: 843 - protein, 160 aa, Homo sapiens
  IL10_E74H
SPGQGTQSENSCTHFPGNLPNMLRDLRDAFSRVKTFFQMKDQLDNLLLKESLLEDFKGYLGCQALSEMIQFYLHEVMPQAENQDPDIKAHVNSLGENLKTLRLRLRRCHRFLPCENKSKAVEQVKNAFNKLQEKGIYKAMSEFDIFINYIEAYMTMKIRN

SEQ ID NO: 844 - protein, 160 aa, Homo sapiens
  IL10_E75N
SPGQGTQSENSCTHFPGNLPNMLRDLRDAFSRVKTFFQMKDQLDNLLLKESLLEDFKGYLGCQALSEMIQFYLENVMPQAENQDPDIKAHVNSLGENLKTLRLRLRRCHRFLPCENKSKAVEQVKNAFNKLQEKGIYKAMSEFDIFINYIEAYMTMKIRN

SEQ ID NO: 845 - protein, 160 aa, Homo sapiens
  IL10_E75Q
SPGQGTQSENSCTHFPGNLPNMLRDLRDAFSRVKTFFQMKDQLDNLLLKESLLEDFKGYLGCQALSEMIQFYLEQVMPQAENQDPDIKAHVNSLGENLKTLRLRLRRCHRFLPCENKSKAVEQVKNAFNKLQEKGIYKAMSEFDIFINYIEAYMTMKIRN

SEQ ID NO: 846 - protein, 160 aa, Homo sapiens
  IL10_E75H
SPGQGTQSENSCTHFPGNLPNMLRDLRDAFSRVKTFFQMKDQLDNLLLKESLLEDFKGYLGCQALSEMIQFYLEHVMPQAENQDPDIKAHVNSLGENLKTLRLRLRRCHRFLPCENKSKAVEQVKNAFNKLQEKGIYKAMSEFDIFINYIEAYMTMKIRN

SEQ ID NO: 847 - protein, 160 aa, Homo sapiens
  IL10_P78A
SPGQGTQSENSCTHFPGNLPNMLRDLRDAFSRVKTFFQMKDQLDNLLLKESLLEDFKGYLGCQALSEMIQFYLEEVMAQAENQDPDIKAHVNSLGENLKTLRLRLRRCHRFLPCENKSKAVEQVKNAFNKLQEKGIYKAMSEFDIFINYIEAYMTMKIRN

SEQ ID NO: 848 - protein, 160 aa, Homo sapiens
  IL10_P78S
SPGQGTQSENSCTHFPGNLPNMLRDLRDAFSRVKTFFQMKDQLDNLLLKESLLEDFKGYLGCQALSEMIQFYLEEVMSQAENQDPDIKAHVNSLGENLKTLRLRLRRCHRFLPCENKSKAVEQVKNAFNKLQEKGIYKAMSEFDIFINYIEAYMTMKIRN

SEQ ID NO: 849 - protein, 160 aa, Homo sapiens
  IL10_E81N
SPGQGTQSENSCTHFPGNLPNMLRDLRDAFSRVKTFFQMKDQLDNLLLKESLLEDFKGYLGCQALSEMIQFYLEEVMPQANNQDPDIKAHVNSLGENLKTLRLRLRRCHRFLPCENKSKAVEQVKNAFNKLQEKGIYKAMSEFDIFINYIEAYMTMKIRN

SEQ ID NO: 850 - protein, 160 aa, Homo sapiens
  IL10_E81Q
SPGQGTQSENSCTHFPGNLPNMLRDLRDAFSRVKTFFQMKDQLDNLLLKESLLEDFKGYLGCQALSEMIQFYLEEVMPQAQNQDPDIKAHVNSLGENLKTLRLRLRRCHRFLPCENKSKAVEQVKNAFNKLQEKGIYKAMSEFDIFINYIEAYMTMKIRN

SEQ ID NO: 851 - protein, 160 aa, Homo sapiens
  IL10_E81H
SPGQGTQSENSCTHFPGNLPNMLRDLRDAFSRVKTFFQMKDQLDNLLLKESLLEDFKGYLGCQALSEMIQFYLEEVMPQAHNQDPDIKAHVNSLGENLKTLRLRLRRCHRFLPCENKSKAVEQVKNAFNKLQEKGIYKAMSEFDIFINYIEAYMTMKIRN

SEQ ID NO: 852 - protein, 160 aa, Homo sapiens
  IL10_D84N
SPGQGTQSENSCTHFPGNLPNMLRDLRDAFSRVKTFFQMKDQLDNLLLKESLLEDFKGYLGCQALSEMIQFYLEEVMPQAENQNPDIKAHVNSLGENLKTLRLRLRRCHRFLPCENKSKAVEQVKNAFNKLQEKGIYKAMSEFDIFINYIEAYMTMKIRN

SEQ ID NO: 853 - protein, 160 aa, Homo sapiens
  IL10_D84Q
SPGQGTQSENSCTHFPGNLPNMLRDLRDAFSRVKTFFQMKDQLDNLLLKESLLEDFKGYLGCQALSEMIQFYLEEVMPQAENQQPDIKAHVNSLGENLKTLRLRLRRCHRFLPCENKSKAVEQVKNAFNKLQEKGIYKAMSEFDIFINYIEAYMTMKIRN

SEQ ID NO: 854 - protein, 160 aa, Homo sapiens
  IL10_P85A
SPGQGTQSENSCTHFPGNLPNMLRDLRDAFSRVKTFFQMKDQLDNLLLKESLLEDFKGYLGCQALSEMIQFYLEEVMPQAENQDADIKAHVNSLGENLKTLRLRLRRCHRFLPCENKSKAVEQVKNAFNKLQEKGIYKAMSEFDIFINYIEAYMTMKIRN

SEQ ID NO: 855 - protein, 160 aa, Homo sapiens
  IL10_P85S
SPGQGTQSENSCTHFPGNLPNMLRDLRDAFSRVKTFFQMKDQLDNLLLKESLLEDFKGYLGCQALSEMIQFYLEEVMPQAENQDSDIKAHVNSLGENLKTLRLRLRRCHRFLPCENKSKAVEQVKNAFNKLQEKGIYKAMSEFDIFINYIEAYMTMKIRN

SEQ ID NO: 856 - protein, 160 aa, Homo sapiens
  IL10_D86N
SPGQGTQSENSCTHFPGNLPNMLRDLRDAFSRVKTFFQMKDQLDNLLLKESLLEDFKGYLGCQALSEMIQFYLEEVMPQAENQDPNIKAHVNSLGENLKTLRLRLRRCHRFLPCENKSKAVEQVKNAFNKLQEKGIYKAMSEFDIFINYIEAYMTMKIRN

SEQ ID NO: 857 - protein, 160 aa, Homo sapiens
  IL10_D86Q
SPGQGTQSENSCTHFPGNLPNMLRDLRDAFSRVKTFFQMKDQLDNLLLKESLLEDFKGYLGCQALSEMIQFYLEEVMPQAENQDPQIKAHVNSLGENLKTLRLRLRRCHRFLPCENKSKAVEQVKNAFNKLQEKGIYKAMSEFDIFINYIEAYMTMKIRN

SEQ ID NO: 858 - protein, 160 aa, Homo sapiens
  IL10_K88N
SPGQGTQSENSCTHFPGNLPNMLRDLRDAFSRVKTFFQMKDQLDNLLLKESLLEDFKGYLGCQALSEMIQFYLEEVMPQAENQDPDINAHVNSLGENLKTLRLRLRRCHRFLPCENKSKAVEQVKNAFNKLQEKGIYKAMSEFDIFINYIEAYMTMKIRN

SEQ ID NO: 859 - protein, 160 aa, Homo sapiens
  IL10_K88Q
SPGQGTQSENSCTHFPGNLPNMLRDLRDAFSRVKTFFQMKDQLDNLLLKESLLEDFKGYLGCQALSEMIQFYLEEVMPQAENQDPDIQAHVNSLGENLKTLRLRLRRCHRFLPCENKSKAVEQVKNAFNKLQEKGIYKAMSEFDIFINYIEAYMTMKIRN

SEQ ID NO: 860 - protein, 197 aa, Homo sapiens
  IL12A_WT
RNLPVATPDPGMFPCLHHSQNLLRAVSNMLQKARQTLEFYPCTSEEIDHEDITKDKTSTVEACLPLELTKNESCLNSRETSFITNGSCLASRKTSFMMALCLSSIYEDLKMYQVEFKTMNAKLLMDPKRQIFLDQNMLAVIDELMQALNFNSETVPQKSSLEEPDFYKTKIKLCILLHAFRIRAVTIDRVMSYLNAS

SEQ ID NO: 861 - protein, 197 aa, Homo sapiens
  IL12A_K56N
RNLPVATPDPGMFPCLHHSQNLLRAVSNMLQKARQTLEFYPCTSEEIDHEDITKDNTSTVEACLPLELTKNESCLNSRETSFITNGSCLASRKTSFMMALCLSSIYEDLKMYQVEFKTMNAKLLMDPKRQIFLDQNMLAVIDELMQALNFNSETVPQKSSLEEPDFYKTKIKLCILLHAFRIRAVTIDRVMSYLNAS

SEQ ID NO: 862 - protein, 197 aa, Homo sapiens
  IL12A_K56Q
RNLPVATPDPGMFPCLHHSQNLLRAVSNMLQKARQTLEFYPCTSEEIDHEDITKDQTSTVEACLPLELTKNESCLNSRETSFITNGSCLASRKTSFMMALCLSSIYEDLKMYQVEFKTMNAKLLMDPKRQIFLDQNMLAVIDELMQALNFNSETVPQKSSLEEPDFYKTKIKLCILLHAFRIRAVTIDRVMSYLNAS

SEQ ID NO: 863 - protein, 197 aa, Homo sapiens
  IL12A_E61N
RNLPVATPDPGMFPCLHHSQNLLRAVSNMLQKARQTLEFYPCTSEEIDHEDITKDKTSTVNACLPLELTKNESCLNSRETSFITNGSCLASRKTSFMMALCLSSIYEDLKMYQVEFKTMNAKLLMDPKRQIFLDQNMLAVIDELMQALNFNSETVPQKSSLEEPDFYKTKIKLCILLHAFRIRAVTIDRVMSYLNAS

SEQ ID NO: 864 - protein, 197 aa, Homo sapiens
  IL12A_E61Q
RNLPVATPDPGMFPCLHHSQNLLRAVSNMLQKARQTLEFYPCTSEEIDHEDITKDKTSTVQACLPLELTKNESCLNSRETSFITNGSCLASRKTSFMMALCLSSIYEDLKMYQVEFKTMNAKLLMDPKRQIFLDQNMLAVIDELMQALNFNSETVPQKSSLEEPDFYKTKIKLCILLHAFRIRAVTIDRVMSYLNAS

SEQ ID NO: 865 - protein, 197 aa, Homo sapiens
  IL12A_E61H
RNLPVATPDPGMFPCLHHSQNLLRAVSNMLQKARQTLEFYPCTSEEIDHEDITKDKTSTVHACLPLELTKNESCLNSRETSFITNGSCLASRKTSFMMALCLSSIYEDLKMYQVEFKTMNAKLLMDPKRQIFLDQNMLAVIDELMQALNFNSETVPQKSSLEEPDFYKTKIKLCILLHAFRIRAVTIDRVMSYLNAS

SEQ ID NO: 866 - protein, 197 aa, Homo sapiens
  IL12A_L66I
RNLPVATPDPGMFPCLHHSQNLLRAVSNMLQKARQTLEFYPCTSEEIDHEDITKDKTSTVEACLPIELTKNESCLNSRETSFITNGSCLASRKTSFMMALCLSSIYEDLKMYQVEFKTMNAKLLMDPKRQIFLDQNMLAVIDELMQALNFNSETVPQKSSLEEPDFYKTKIKLCILLHAFRIRAVTIDRVMSYLNAS

SEQ ID NO: 867 - protein, 197 aa, Homo sapiens
  IL12A_L66V
RNLPVATPDPGMFPCLHHSQNLLRAVSNMLQKARQTLEFYPCTSEEIDHEDITKDKTSTVEACLPVELTKNESCLNSRETSFITNGSCLASRKTSFMMALCLSSIYEDLKMYQVEFKTMNAKLLMDPKRQIFLDQNMLAVIDELMQALNFNSETVPQKSSLEEPDFYKTKIKLCILLHAFRIRAVTIDRVMSYLNAS

SEQ ID NO: 868 - protein, 197 aa, Homo sapiens
  IL12A_E67N
RNLPVATPDPGMFPCLHHSQNLLRAVSNMLQKARQTLEFYPCTSEEIDHEDITKDKTSTVEACLPLNLTKNESCLNSRETSFITNGSCLASRKTSFMMALCLSSIYEDLKMYQVEFKTMNAKLLMDPKRQIFLDQNMLAVIDELMQALNFNSETVPQKSSLEEPDFYKTKIKLCILLHAFRIRAVTIDRVMSYLNAS

SEQ ID NO: 869 - protein, 197 aa, Homo sapiens
  IL12A_E67Q
RNLPVATPDPGMFPCLHHSQNLLRAVSNMLQKARQTLEFYPCTSEEIDHEDITKDKTSTVEACLPLQLTKNESCLNSRETSFITNGSCLASRKTSFMMALCLSSIYEDLKMYQVEFKTMNAKLLMDPKRQIFLDQNMLAVIDELMQALNFNSETVPQKSSLEEPDFYKTKIKLCILLHAFRIRAVTIDRVMSYLNAS

SEQ ID NO: 870 - protein, 197 aa, Homo sapiens
  IL12A_E67H
RNLPVATPDPGMFPCLHHSQNLLRAVSNMLQKARQTLEFYPCTSEEIDHEDITKDKTSTVEACLPLHLTKNESCLNSRETSFITNGSCLASRKTSFMMALCLSSIYEDLKMYQVEFKTMNAKLLMDPKRQIFLDQNMLAVIDELMQALNFNSETVPQKSSLEEPDFYKTKIKLCILLHAFRIRAVTIDRVMSYLNAS

SEQ ID NO: 871 - protein, 197 aa, Homo sapiens
  IL12A_L68I
RNLPVATPDPGMFPCLHHSQNLLRAVSNMLQKARQTLEFYPCTSEEIDHEDITKDKTSTVEACLPLEITKNESCLNSRETSFITNGSCLASRKTSFMMALCLSSIYEDLKMYQVEFKTMNAKLLMDPKRQIFLDQNMLAVIDELMQALNFNSETVPQKSSLEEPDFYKTKIKLCILLHAFRIRAVTIDRVMSYLNAS

SEQ ID NO: 872 - protein, 197 aa, Homo sapiens
  IL12A_L68V
RNLPVATPDPGMFPCLHHSQNLLRAVSNMLQKARQTLEFYPCTSEEIDHEDITKDKTSTVEACLPLEVTKNESCLNSRETSFITNGSCLASRKTSFMMALCLSSIYEDLKMYQVEFKTMNAKLLMDPKRQIFLDQNMLAVIDELMQALNFNSETVPQKSSLEEPDFYKTKIKLCILLHAFRIRAVTIDRVMSYLNAS

SEQ ID NO: 873 - protein, 197 aa, Homo sapiens
  IL12A_K70N
RNLPVATPDPGMFPCLHHSQNLLRAVSNMLQKARQTLEFYPCTSEEIDHEDITKDKTSTVEACLPLELTNNESCLNSRETSFITNGSCLASRKTSFMMALCLSSIYEDLKMYQVEFKTMNAKLLMDPKRQIFLDQNMLAVIDELMQALNFNSETVPQKSSLEEPDFYKTKIKLCILLHAFRIRAVTIDRVMSYLNAS

SEQ ID NO: 874 - protein, 197 aa, Homo sapiens
  IL12A_K70Q
RNLPVATPDPGMFPCLHHSQNLLRAVSNMLQKARQTLEFYPCTSEEIDHEDITKDKTSTVEACLPLELTQNESCLNSRETSFITNGSCLASRKTSFMMALCLSSIYEDLKMYQVEFKTMNAKLLMDPKRQIFLDQNMLAVIDELMQALNFNSETVPQKSSLEEPDFYKTKIKLCILLHAFRIRAVTIDRVMSYLNAS

SEQ ID NO: 875 - protein, 197 aa, Homo sapiens
  IL12A_E72N
RNLPVATPDPGMFPCLHHSQNLLRAVSNMLQKARQTLEFYPCTSEEIDHEDITKDKTSTVEACLPLELTKNNSCLNSRETSFITNGSCLASRKTSFMMALCLSSIYEDLKMYQVEFKTMNAKLLMDPKRQIFLDQNMLAVIDELMQALNFNSETVPQKSSLEEPDFYKTKIKLCILLHAFRIRAVTIDRVMSYLNAS

SEQ ID NO: 876 - protein, 197 aa, Homo sapiens
  IL12A_E72Q
RNLPVATPDPGMFPCLHHSQNLLRAVSNMLQKARQTLEFYPCTSEEIDHEDITKDKTSTVEACLPLELTKNQSCLNSRETSFITNGSCLASRKTSFMMALCLSSIYEDLKMYQVEFKTMNAKLLMDPKRQIFLDQNMLAVIDELMQALNFNSETVPQKSSLEEPDFYKTKIKLCILLHAFRIRAVTIDRVMSYLNAS

SEQ ID NO: 877 - protein, 197 aa, Homo sapiens
  IL12A_E72H
RNLPVATPDPGMFPCLHHSQNLLRAVSNMLQKARQTLEFYPCTSEEIDHEDITKDKTSTVEACLPLELTKNHSCLNSRETSFITNGSCLASRKTSFMMALCLSSIYEDLKMYQVEFKTMNAKLLMDPKRQIFLDQNMLAVIDELMQALNFNSETVPQKSSLEEPDFYKTKIKLCILLHAFRIRAVTIDRVMSYLNAS

SEQ ID NO: 878 - protein, 197 aa, Homo sapiens
  IL12A_L75I
RNLPVATPDPGMFPCLHHSQNLLRAVSNMLQKARQTLEFYPCTSEEIDHEDITKDKTSTVEACLPLELTKNESCINSRETSFITNGSCLASRKTSFMMALCLSSIYEDLKMYQVEFKTMNAKLLMDPKRQIFLDQNMLAVIDELMQALNFNSETVPQKSSLEEPDFYKTKIKLCILLHAFRIRAVTIDRVMSYLNAS

SEQ ID NO: 879 - protein, 197 aa, Homo sapiens
  IL12A_L75V
RNLPVATPDPGMFPCLHHSQNLLRAVSNMLQKARQTLEFYPCTSEEIDHEDITKDKTSTVEACLPLELTKNESCVNSRETSFITNGSCLASRKTSFMMALCLSSIYEDLKMYQVEFKTMNAKLLMDPKRQIFLDQNMLAVIDELMQALNFNSETVPQKSSLEEPDFYKTKIKLCILLHAFRIRAVTIDRVMSYLNAS

SEQ ID NO: 880 - protein, 197 aa, Homo sapiens
  IL12A_R78H
RNLPVATPDPGMFPCLHHSQNLLRAVSNMLQKARQTLEFYPCTSEEIDHEDITKDKTSTVEACLPLELTKNESCLNSHETSFITNGSCLASRKTSFMMALCLSSIYEDLKMYQVEFKTMNAKLLMDPKRQIFLDQNMLAVIDELMQALNFNSETVPQKSSLEEPDFYKTKIKLCILLHAFRIRAVTIDRVMSYLNAS

SEQ ID NO: 881 - protein, 197 aa, Homo sapiens
  IL12A_R78Q
RNLPVATPDPGMFPCLHHSQNLLRAVSNMLQKARQTLEFYPCTSEEIDHEDITKDKTSTVEACLPLELTKNESCLNSQETSFITNGSCLASRKTSFMMALCLSSIYEDLKMYQVEFKTMNAKLLMDPKRQIFLDQNMLAVIDELMQALNFNSETVPQKSSLEEPDFYKTKIKLCILLHAFRIRAVTIDRVMSYLNAS

SEQ ID NO: 882 - protein, 197 aa, Homo sapiens
  IL12A_E79N
RNLPVATPDPGMFPCLHHSQNLLRAVSNMLQKARQTLEFYPCTSEEIDHEDITKDKTSTVEACLPLELTKNESCLNSRNTSFITNGSCLASRKTSFMMALCLSSIYEDLKMYQVEFKTMNAKLLMDPKRQIFLDQNMLAVIDELMQALNFNSETVPQKSSLEEPDFYKTKIKLCILLHAFRIRAVTIDRVMSYLNAS

SEQ ID NO: 883 - protein, 197 aa, Homo sapiens
  IL12A_E79Q
RNLPVATPDPGMFPCLHHSQNLLRAVSNMLQKARQTLEFYPCTSEEIDHEDITKDKTSTVEACLPLELTKNESCLNSRQTSFITNGSCLASRKTSFMMALCLSSIYEDLKMYQVEFKTMNAKLLMDPKRQIFLDQNMLAVIDELMQALNFNSETVPQKSSLEEPDFYKTKIKLCILLHAFRIRAVTIDRVMSYLNAS

SEQ ID NO: 884 - protein, 197 aa, Homo sapiens
  IL12A_E79H
RNLPVATPDPGMFPCLHHSQNLLRAVSNMLQKARQTLEFYPCTSEEIDHEDITKDKTSTVEACLPLELTKNESCLNSRHTSFITNGSCLASRKTSFMMALCLSSIYEDLKMYQVEFKTMNAKLLMDPKRQIFLDQNMLAVIDELMQALNFNSETVPQKSSLEEPDFYKTKIKLCILLHAFRIRAVTIDRVMSYLNAS

SEQ ID NO: 885 - protein, 197 aa, Homo sapiens
  IL12A_F82I
RNLPVATPDPGMFPCLHHSQNLLRAVSNMLQKARQTLEFYPCTSEEIDHEDITKDKTSTVEACLPLELTKNESCLNSRETSIITNGSCLASRKTSFMMALCLSSIYEDLKMYQVEFKTMNAKLLMDPKRQIFLDQNMLAVIDELMQALNFNSETVPQKSSLEEPDFYKTKIKLCILLHAFRIRAVTIDRVMSYLNAS

SEQ ID NO: 886 - protein, 197 aa, Homo sapiens
  IL12A_F82V
RNLPVATPDPGMFPCLHHSQNLLRAVSNMLQKARQTLEFYPCTSEEIDHEDITKDKTSTVEACLPLELTKNESCLNSRETSVITNGSCLASRKTSFMMALCLSSIYEDLKMYQVEFKTMNAKLLMDPKRQIFLDQNMLAVIDELMQALNFNSETVPQKSSLEEPDFYKTKIKLCILLHAFRIRAVTIDRVMSYLNAS

SEQ ID NO: 887 - protein, 197 aa, Homo sapiens
  IL12A_L89I
RNLPVATPDPGMFPCLHHSQNLLRAVSNMLQKARQTLEFYPCTSEEIDHEDITKDKTSTVEACLPLELTKNESCLNSRETSFITNGSCIASRKTSFMMALCLSSIYEDLKMYQVEFKTMNAKLLMDPKRQIFLDQNMLAVIDELMQALNFNSETVPQKSSLEEPDFYKTKIKLCILLHAFRIRAVTIDRVMSYLNAS

SEQ ID NO: 888 - protein, 197 aa, Homo sapiens
  IL12A_L89V
RNLPVATPDPGMFPCLHHSQNLLRAVSNMLQKARQTLEFYPCTSEEIDHEDITKDKTSTVEACLPLELTKNESCLNSRETSFITNGSCVASRKTSFMMALCLSSIYEDLKMYQVEFKTMNAKLLMDPKRQIFLDQNMLAVIDELMQALNFNSETVPQKSSLEEPDFYKTKIKLCILLHAFRIRAVTIDRVMSYLNAS

SEQ ID NO: 889 - protein, 197 aa, Homo sapiens
  IL12A_R92H
RNLPVATPDPGMFPCLHHSQNLLRAVSNMLQKARQTLEFYPCTSEEIDHEDITKDKTSTVEACLPLELTKNESCLNSRETSFITNGSCLASHKTSFMMALCLSSIYEDLKMYQVEFKTMNAKLLMDPKRQIFLDQNMLAVIDELMQALNFNSETVPQKSSLEEPDFYKTKIKLCILLHAFRIRAVTIDRVMSYLNAS

SEQ ID NO: 890 - protein, 197 aa, Homo sapiens
  IL12A_R92Q
RNLPVATPDPGMFPCLHHSQNLLRAVSNMLQKARQTLEFYPCTSEEIDHEDITKDKTSTVEACLPLELTKNESCLNSRETSFITNGSCLASQKTSFMMALCLSSIYEDLKMYQVEFKTMNAKLLMDPKRQIFLDQNMLAVIDELMQALNFNSETVPQKSSLEEPDFYKTKIKLCILLHAFRIRAVTIDRVMSYLNAS

SEQ ID NO: 891 - protein, 197 aa, Homo sapiens
  IL12A_K93N
RNLPVATPDPGMFPCLHHSQNLLRAVSNMLQKARQTLEFYPCTSEEIDHEDITKDKTSTVEACLPLELTKNESCLNSRETSFITNGSCLASRNTSFMMALCLSSIYEDLKMYQVEFKTMNAKLLMDPKRQIFLDQNMLAVIDELMQALNFNSETVPQKSSLEEPDFYKTKIKLCILLHAFRIRAVTIDRVMSYLNAS

SEQ ID NO: 892 - protein, 197 aa, Homo sapiens
  IL12A_K93Q
RNLPVATPDPGMFPCLHHSQNLLRAVSNMLQKARQTLEFYPCTSEEIDHEDITKDKTSTVEACLPLELTKNESCLNSRETSFITNGSCLASRQTSFMMALCLSSIYEDLKMYQVEFKTMNAKLLMDPKRQIFLDQNMLAVIDELMQALNFNSETVPQKSSLEEPDFYKTKIKLCILLHAFRIRAVTIDRVMSYLNAS

SEQ ID NO: 893 - protein, 197 aa, Homo sapiens
  IL12A_E107N
RNLPVATPDPGMFPCLHHSQNLLRAVSNMLQKARQTLEFYPCTSEEIDHEDITKDKTSTVEACLPLELTKNESCLNSRETSFITNGSCLASRKTSFMMALCLSSIYNDLKMYQVEFKTMNAKLLMDPKRQIFLDQNMLAVIDELMQALNFNSETVPQKSSLEEPDFYKTKIKLCILLHAFRIRAVTIDRVMSYLNAS

SEQ ID NO: 894 - protein, 197 aa, Homo sapiens
  IL12A_E107Q
RNLPVATPDPGMFPCLHHSQNLLRAVSNMLQKARQTLEFYPCTSEEIDHEDITKDKTSTVEACLPLELTKNESCLNSRETSFITNGSCLASRKTSFMMALCLSSIYQDLKMYQVEFKTMNAKLLMDPKRQIFLDQNMLAVIDELMQALNFNSETVPQKSSLEEPDFYKTKIKLCILLHAFRIRAVTIDRVMSYLNAS

SEQ ID NO: 895 - protein, 197 aa, Homo sapiens
  IL12A_E107H
RNLPVATPDPGMFPCLHHSQNLLRAVSNMLQKARQTLEFYPCTSEEIDHEDITKDKTSTVEACLPLELTKNESCLNSRETSFITNGSCLASRKTSFMMALCLSSIYHDLKMYQVEFKTMNAKLLMDPKRQIFLDQNMLAVIDELMQALNFNSETVPQKSSLEEPDFYKTKIKLCILLHAFRIRAVTIDRVMSYLNAS

SEQ ID NO: 896 - protein, 197 aa, Homo sapiens
  IL12A_K110N
RNLPVATPDPGMFPCLHHSQNLLRAVSNMLQKARQTLEFYPCTSEEIDHEDITKDKTSTVEACLPLELTKNESCLNSRETSFITNGSCLASRKTSFMMALCLSSIYEDLNMYQVEFKTMNAKLLMDPKRQIFLDQNMLAVIDELMQALNFNSETVPQKSSLEEPDFYKTKIKLCILLHAFRIRAVTIDRVMSYLNAS

SEQ ID NO: 897 - protein, 197 aa, Homo sapiens
  IL12A_K110Q
RNLPVATPDPGMFPCLHHSQNLLRAVSNMLQKARQTLEFYPCTSEEIDHEDITKDKTSTVEACLPLELTKNESCLNSRETSFITNGSCLASRKTSFMMALCLSSIYEDLQMYQVEFKTMNAKLLMDPKRQIFLDQNMLAVIDELMQALNFNSETVPQKSSLEEPDFYKTKIKLCILLHAFRIRAVTIDRVMSYLNAS

SEQ ID NO: 898 - protein, 197 aa, Homo sapiens
  IL12A_M111I
RNLPVATPDPGMFPCLHHSQNLLRAVSNMLQKARQTLEFYPCTSEEIDHEDITKDKTSTVEACLPLELTKNESCLNSRETSFITNGSCLASRKTSFMMALCLSSIYEDLKIYQVEFKTMNAKLLMDPKRQIFLDQNMLAVIDELMQALNFNSETVPQKSSLEEPDFYKTKIKLCILLHAFRIRAVTIDRVMSYLNAS

SEQ ID NO: 899 - protein, 197 aa, Homo sapiens
  IL12A_M111V
RNLPVATPDPGMFPCLHHSQNLLRAVSNMLQKARQTLEFYPCTSEEIDHEDITKDKTSTVEACLPLELTKNESCLNSRETSFITNGSCLASRKTSFMMALCLSSIYEDLKVYQVEFKTMNAKLLMDPKRQIFLDQNMLAVIDELMQALNFNSETVPQKSSLEEPDFYKTKIKLCILLHAFRIRAVTIDRVMSYLNAS

SEQ ID NO: 900 - protein, 197 aa, Homo sapiens
  IL12A_E115N
RNLPVATPDPGMFPCLHHSQNLLRAVSNMLQKARQTLEFYPCTSEEIDHEDITKDKTSTVEACLPLELTKNESCLNSRETSFITNGSCLASRKTSFMMALCLSSIYEDLKMYQVNFKTMNAKLLMDPKRQIFLDQNMLAVIDELMQALNFNSETVPQKSSLEEPDFYKTKIKLCILLHAFRIRAVTIDRVMSYLNAS

SEQ ID NO: 901 - protein, 197 aa, Homo sapiens
  IL12A_E115Q
RNLPVATPDPGMFPCLHHSQNLLRAVSNMLQKARQTLEFYPCTSEEIDHEDITKDKTSTVEACLPLELTKNESCLNSRETSFITNGSCLASRKTSFMMALCLSSIYEDLKMYQVQFKTMNAKLLMDPKRQIFLDQNMLAVIDELMQALNFNSETVPQKSSLEEPDFYKTKIKLCILLHAFRIRAVTIDRVMSYLNAS

SEQ ID NO: 902 - protein, 197 aa, Homo sapiens
  IL12A_E115H
RNLPVATPDPGMFPCLHHSQNLLRAVSNMLQKARQTLEFYPCTSEEIDHEDITKDKTSTVEACLPLELTKNESCLNSRETSFITNGSCLASRKTSFMMALCLSSIYEDLKMYQVHFKTMNAKLLMDPKRQIFLDQNMLAVIDELMQALNFNSETVPQKSSLEEPDFYKTKIKLCILLHAFRIRAVTIDRVMSYLNAS

SEQ ID NO: 903 - protein, 197 aa, Homo sapiens
  IL12A_K117N
RNLPVATPDPGMFPCLHHSQNLLRAVSNMLQKARQTLEFYPCTSEEIDHEDITKDKTSTVEACLPLELTKNESCLNSRETSFITNGSCLASRKTSFMMALCLSSIYEDLKMYQVEFNTMNAKLLMDPKRQIFLDQNMLAVIDELMQALNFNSETVPQKSSLEEPDFYKTKIKLCILLHAFRIRAVTIDRVMSYLNAS

SEQ ID NO: 904 - protein, 197 aa, Homo sapiens
  IL12A_K117Q
RNLPVATPDPGMFPCLHHSQNLLRAVSNMLQKARQTLEFYPCTSEEIDHEDITKDKTSTVEACLPLELTKNESCLNSRETSFITNGSCLASRKTSFMMALCLSSIYEDLKMYQVEFQTMNAKLLMDPKRQIFLDQNMLAVIDELMQALNFNSETVPQKSSLEEPDFYKTKIKLCILLHAFRIRAVTIDRVMSYLNAS

SEQ ID NO: 905 - protein, 197 aa, Homo sapiens
  IL12A_L124I
RNLPVATPDPGMFPCLHHSQNLLRAVSNMLQKARQTLEFYPCTSEEIDHEDITKDKTSTVEACLPLELTKNESCLNSRETSFITNGSCLASRKTSFMMALCLSSIYEDLKMYQVEFKTMNAKLIMDPKRQIFLDQNMLAVIDELMQALNFNSETVPQKSSLEEPDFYKTKIKLCILLHAFRIRAVTIDRVMSYLNAS

SEQ ID NO: 906 - protein, 197 aa, Homo sapiens
  IL12A_L124V
RNLPVATPDPGMFPCLHHSQNLLRAVSNMLQKARQTLEFYPCTSEEIDHEDITKDKTSTVEACLPLELTKNESCLNSRETSFITNGSCLASRKTSFMMALCLSSIYEDLKMYQVEFKTMNAKLVMDPKRQIFLDQNMLAVIDELMQALNFNSETVPQKSSLEEPDFYKTKIKLCILLHAFRIRAVTIDRVMSYLNAS

SEQ ID NO: 907 - protein, 197 aa, Homo sapiens
  IL12A_M125I
RNLPVATPDPGMFPCLHHSQNLLRAVSNMLQKARQTLEFYPCTSEEIDHEDITKDKTSTVEACLPLELTKNESCLNSRETSFITNGSCLASRKTSFMMALCLSSIYEDLKMYQVEFKTMNAKLLIDPKRQIFLDQNMLAVIDELMQALNFNSETVPQKSSLEEPDFYKTKIKLCILLHAFRIRAVTIDRVMSYLNAS

SEQ ID NO: 908 - protein, 197 aa, Homo sapiens
  IL12A_M125V
RNLPVATPDPGMFPCLHHSQNLLRAVSNMLQKARQTLEFYPCTSEEIDHEDITKDKTSTVEACLPLELTKNESCLNSRETSFITNGSCLASRKTSFMMALCLSSIYEDLKMYQVEFKTMNAKLLVDPKRQIFLDQNMLAVIDELMQALNFNSETVPQKSSLEEPDFYKTKIKLCILLHAFRIRAVTIDRVMSYLNAS

SEQ ID NO: 909 - protein, 197 aa, Homo sapiens
  IL12A_P127A
RNLPVATPDPGMFPCLHHSQNLLRAVSNMLQKARQTLEFYPCTSEEIDHEDITKDKTSTVEACLPLELTKNESCLNSRETSFITNGSCLASRKTSFMMALCLSSIYEDLKMYQVEFKTMNAKLLMDAKRQIFLDQNMLAVIDELMQALNFNSETVPQKSSLEEPDFYKTKIKLCILLHAFRIRAVTIDRVMSYLNAS

SEQ ID NO: 910 - protein, 197 aa, Homo sapiens
  IL12A_P127S
RNLPVATPDPGMFPCLHHSQNLLRAVSNMLQKARQTLEFYPCTSEEIDHEDITKDKTSTVEACLPLELTKNESCLNSRETSFITNGSCLASRKTSFMMALCLSSIYEDLKMYQVEFKTMNAKLLMDSKRQIFLDQNMLAVIDELMQALNFNSETVPQKSSLEEPDFYKTKIKLCILLHAFRIRAVTIDRVMSYLNAS

SEQ ID NO: 911 - protein, 197 aa, Homo sapiens
  IL12A_K128N
RNLPVATPDPGMFPCLHHSQNLLRAVSNMLQKARQTLEFYPCTSEEIDHEDITKDKTSTVEACLPLELTKNESCLNSRETSFITNGSCLASRKTSFMMALCLSSIYEDLKMYQVEFKTMNAKLLMDPNRQIFLDQNMLAVIDELMQALNFNSETVPQKSSLEEPDFYKTKIKLCILLHAFRIRAVTIDRVMSYLNAS

SEQ ID NO: 912 - protein, 197 aa, Homo sapiens
  IL12A_K128Q
RNLPVATPDPGMFPCLHHSQNLLRAVSNMLQKARQTLEFYPCTSEEIDHEDITKDKTSTVEACLPLELTKNESCLNSRETSFITNGSCLASRKTSFMMALCLSSIYEDLKMYQVEFKTMNAKLLMDPQRQIFLDQNMLAVIDELMQALNFNSETVPQKSSLEEPDFYKTKIKLCILLHAFRIRAVTIDRVMSYLNAS

SEQ ID NO: 913 - protein, 197 aa, Homo sapiens
  IL12A_R129H
RNLPVATPDPGMFPCLHHSQNLLRAVSNMLQKARQTLEFYPCTSEEIDHEDITKDKTSTVEACLPLELTKNESCLNSRETSFITNGSCLASRKTSFMMALCLSSIYEDLKMYQVEFKTMNAKLLMDPKHQIFLDQNMLAVIDELMQALNFNSETVPQKSSLEEPDFYKTKIKLCILLHAFRIRAVTIDRVMSYLNAS

SEQ ID NO: 914 - protein, 197 aa, Homo sapiens
  IL12A_R129Q
RNLPVATPDPGMFPCLHHSQNLLRAVSNMLQKARQTLEFYPCTSEEIDHEDITKDKTSTVEACLPLELTKNESCLNSRETSFITNGSCLASRKTSFMMALCLSSIYEDLKMYQVEFKTMNAKLLMDPKQQIFLDQNMLAVIDELMQALNFNSETVPQKSSLEEPDFYKTKIKLCILLHAFRIRAVTIDRVMSYLNAS

SEQ ID NO: 915 - protein, 197 aa, Homo sapiens
  IL12A_R189H
RNLPVATPDPGMFPCLHHSQNLLRAVSNMLQKARQTLEFYPCTSEEIDHEDITKDKTSTVEACLPLELTKNESCLNSRETSFITNGSCLASRKTSFMMALCLSSIYEDLKMYQVEFKTMNAKLLMDPKRQIFLDQNMLAVIDELMQALNFNSETVPQKSSLEEPDFYKTKIKLCILLHAFRIRAVTIDHVMSYLNAS

SEQ ID NO: 916 - protein, 197 aa, Homo sapiens
  IL12A_R189Q
RNLPVATPDPGMFPCLHHSQNLLRAVSNMLQKARQTLEFYPCTSEEIDHEDITKDKTSTVEACLPLELTKNESCLNSRETSFITNGSCLASRKTSFMMALCLSSIYEDLKMYQVEFKTMNAKLLMDPKRQIFLDQNMLAVIDELMQALNFNSETVPQKSSLEEPDFYKTKIKLCILLHAFRIRAVTIDQVMSYLNAS

SEQ ID NO: 917 - protein, 112 aa, Homo sapiens
  IL13_WT
GPVPPSTALRELIEELVNITQNQKAPLCNGSMVWSINLTAGMYCAALESLINVSGCSAIEKTQRMLSGFCPHKVSAGQFSSLHVRDTKIEVAQFVKDLLLHLKKLFREGRFN

SEQ ID NO: 918 - protein, 112 aa, Homo sapiens
  IL13_M32I
GPVPPSTALRELIEELVNITQNQKAPLCNGSIVWSINLTAGMYCAALESLINVSGCSAIEKTQRMLSGFCPHKVSAGQFSSLHVRDTKIEVAQFVKDLLLHLKKLFREGRFN

SEQ ID NO: 919 - protein, 112 aa, Homo sapiens
  IL13_M32V
GPVPPSTALRELIEELVNITQNQKAPLCNGSVVWSINLTAGMYCAALESLINVSGCSAIEKTQRMLSGFCPHKVSAGQFSSLHVRDTKIEVAQFVKDLLLHLKKLFREGRFN

SEQ ID NO: 920 - protein, 112 aa, Homo sapiens
  IL13_W34S
GPVPPSTALRELIEELVNITQNQKAPLCNGSMVSSINLTAGMYCAALESLINVSGCSAIEKTQRMLSGFCPHKVSAGQFSSLHVRDTKIEVAQFVKDLLLHLKKLFREGRFN

SEQ ID NO: 921 - protein, 112 aa, Homo sapiens
  IL13_W34H
GPVPPSTALRELIEELVNITQNQKAPLCNGSMVHSINLTAGMYCAALESLINVSGCSAIEKTQRMLSGFCPHKVSAGQFSSLHVRDTKIEVAQFVKDLLLHLKKLFREGRFN

SEQ ID NO: 922 - protein, 112 aa, Homo sapiens
  IL13_L38I
GPVPPSTALRELIEELVNITQNQKAPLCNGSMVWSINITAGMYCAALESLINVSGCSAIEKTQRMLSGFCPHKVSAGQFSSLHVRDTKIEVAQFVKDLLLHLKKLFREGRFN

SEQ ID NO: 923 - protein, 112 aa, Homo sapiens
  IL13_L38V
GPVPPSTALRELIEELVNITQNQKAPLCNGSMVWSINVTAGMYCAALESLINVSGCSAIEKTQRMLSGFCPHKVSAGQFSSLHVRDTKIEVAQFVKDLLLHLKKLFREGRFN

SEQ ID NO: 924 - protein, 112 aa, Homo sapiens
  IL13_E48N
GPVPPSTALRELIEELVNITQNQKAPLCNGSMVWSINLTAGMYCAALNSLINVSGCSAIEKTQRMLSGFCPHKVSAGQFSSLHVRDTKIEVAQFVKDLLLHLKKLFREGRFN

SEQ ID NO: 925 - protein, 112 aa, Homo sapiens
  IL13_E48Q
GPVPPSTALRELIEELVNITQNQKAPLCNGSMVWSINLTAGMYCAALQSLINVSGCSAIEKTQRMLSGFCPHKVSAGQFSSLHVRDTKIEVAQFVKDLLLHLKKLFREGRFN

SEQ ID NO: 926 - protein, 112 aa, Homo sapiens
  IL13_E48H
GPVPPSTALRELIEELVNITQNQKAPLCNGSMVWSINLTAGMYCAALHSLINVSGCSAIEKTQRMLSGFCPHKVSAGQFSSLHVRDTKIEVAQFVKDLLLHLKKLFREGRFN

SEQ ID NO: 927 - protein, 112 aa, Homo sapiens
  IL13_F79I
GPVPPSTALRELIEELVNITQNQKAPLCNGSMVWSINLTAGMYCAALESLINVSGCSAIEKTQRMLSGFCPHKVSAGQISSLHVRDTKIEVAQFVKDLLLHLKKLFREGRFN

SEQ ID NO: 928 - protein, 112 aa, Homo sapiens
  IL13_F79V
GPVPPSTALRELIEELVNITQNQKAPLCNGSMVWSINLTAGMYCAALESLINVSGCSAIEKTQRMLSGFCPHKVSAGQVSSLHVRDTKIEVAQFVKDLLLHLKKLFREGRFN

SEQ ID NO: 929 - protein, 112 aa, Homo sapiens
  IL13_L82I
GPVPPSTALRELIEELVNITQNQKAPLCNGSMVWSINLTAGMYCAALESLINVSGCSAIEKTQRMLSGFCPHKVSAGQFSSIHVRDTKIEVAQFVKDLLLHLKKLFREGRFN

SEQ ID NO: 930 - protein, 112 aa, Homo sapiens
  IL13_L82V
GPVPPSTALRELIEELVNITQNQKAPLCNGSMVWSINLTAGMYCAALESLINVSGCSAIEKTQRMLSGFCPHKVSAGQFSSVHVRDTKIEVAQFVKDLLLHLKKLFREGRFN

SEQ ID NO: 931 - protein, 112 aa, Homo sapiens
  IL13_R85H
GPVPPSTALRELIEELVNITQNQKAPLCNGSMVWSINLTAGMYCAALESLINVSGCSAIEKTQRMLSGFCPHKVSAGQFSSLHVHDTKIEVAQFVKDLLLHLKKLFREGRFN

SEQ ID NO: 932 - protein, 112 aa, Homo sapiens
  IL13_R85Q
GPVPPSTALRELIEELVNITQNQKAPLCNGSMVWSINLTAGMYCAALESLINVSGCSAIEKTQRMLSGFCPHKVSAGQFSSLHVQDTKIEVAQFVKDLLLHLKKLFREGRFN

SEQ ID NO: 933 - protein, 112 aa, Homo sapiens
  IL13_D86N
GPVPPSTALRELIEELVNITQNQKAPLCNGSMVWSINLTAGMYCAALESLINVSGCSAIEKTQRMLSGFCPHKVSAGQFSSLHVRNTKIEVAQFVKDLLLHLKKLFREGRFN

SEQ ID NO: 934 - protein, 112 aa, Homo sapiens
  IL13_D86Q
GPVPPSTALRELIEELVNITQNQKAPLCNGSMVWSINLTAGMYCAALESLINVSGCSAIEKTQRMLSGFCPHKVSAGQFSSLHVRQTKIEVAQFVKDLLLHLKKLFREGRFN

SEQ ID NO: 935 - protein, 112 aa, Homo sapiens
  IL13_K88N
GPVPPSTALRELIEELVNITQNQKAPLCNGSMVWSINLTAGMYCAALESLINVSGCSAIEKTQRMLSGFCPHKVSAGQFSSLHVRDTNIEVAQFVKDLLLHLKKLFREGRFN

SEQ ID NO: 936 - protein, 112 aa, Homo sapiens
  IL13_K88Q
GPVPPSTALRELIEELVNITQNQKAPLCNGSMVWSINLTAGMYCAALESLINVSGCSAIEKTQRMLSGFCPHKVSAGQFSSLHVRDTQIEVAQFVKDLLLHLKKLFREGRFN

SEQ ID NO: 937 - protein, 112 aa, Homo sapiens
  IL13_R107H
GPVPPSTALRELIEELVNITQNQKAPLCNGSMVWSINLTAGMYCAALESLINVSGCSAIEKTQRMLSGFCPHKVSAGQFSSLHVRDTKIEVAQFVKDLLLHLKKLFHEGRFN

SEQ ID NO: 938 - protein, 112 aa, Homo sapiens
  IL13_R107Q
GPVPPSTALRELIEELVNITQNQKAPLCNGSMVWSINLTAGMYCAALESLINVSGCSAIEKTQRMLSGFCPHKVSAGQFSSLHVRDTKIEVAQFVKDLLLHLKKLFQEGRFN

SEQ ID NO: 939 - protein, 112 aa, Homo sapiens
  IL13_E108N
GPVPPSTALRELIEELVNITQNQKAPLCNGSMVWSINLTAGMYCAALESLINVSGCSAIEKTQRMLSGFCPHKVSAGQFSSLHVRDTKIEVAQFVKDLLLHLKKLFRNGRFN

SEQ ID NO: 940 - protein, 112 aa, Homo sapiens
  IL13_E108Q
GPVPPSTALRELIEELVNITQNQKAPLCNGSMVWSINLTAGMYCAALESLINVSGCSAIEKTQRMLSGFCPHKVSAGQFSSLHVRDTKIEVAQFVKDLLLHLKKLFRQGRFN

SEQ ID NO: 941 - protein, 112 aa, Homo sapiens
  IL13_E108H
GPVPPSTALRELIEELVNITQNQKAPLCNGSMVWSINLTAGMYCAALESLINVSGCSAIEKTQRMLSGFCPHKVSAGQFSSLHVRDTKIEVAQFVKDLLLHLKKLFRHGRFN

SEQ ID NO: 942 - protein, 112 aa, Homo sapiens
  IL13_R110H
GPVPPSTALRELIEELVNITQNQKAPLCNGSMVWSINLTAGMYCAALESLINVSGCSAIEKTQRMLSGFCPHKVSAGQFSSLHVRDTKIEVAQFVKDLLLHLKKLFREGHFN

SEQ ID NO: 943 - protein, 112 aa, Homo sapiens
  IL13_R110Q
GPVPPSTALRELIEELVNITQNQKAPLCNGSMVWSINLTAGMYCAALESLINVSGCSAIEKTQRMLSGFCPHKVSAGQFSSLHVRDTKIEVAQFVKDLLLHLKKLFREGQFN

SEQ ID NO: 944 - protein, 112 aa, Homo sapiens
  IL13_F111I
GPVPPSTALRELIEELVNITQNQKAPLCNGSMVWSINLTAGMYCAALESLINVSGCSAIEKTQRMLSGFCPHKVSAGQFSSLHVRDTKIEVAQFVKDLLLHLKKLFREGRIN

SEQ ID NO: 945 - protein, 112 aa, Homo sapiens
  IL13_F111V
GPVPPSTALRELIEELVNITQNQKAPLCNGSMVWSINLTAGMYCAALESLINVSGCSAIEKTQRMLSGFCPHKVSAGQFSSLHVRDTKIEVAQFVKDLLLHLKKLFREGRVN

SEQ ID NO: 946 - protein, 133 aa, Homo sapiens [sequence omitted]

SEQ ID NO: 947 - protein, 133 aa, Homo sapiens
  IL2_K43N
APTSSSTKKTQLQLEHLLLDLQMILNGINNYKNPKLTRMLTFNFYMPKKATELKHLQCLEEELKPLEEVLNLAQSKNFHLRPRDLISNINVIVLELKGSETTFMCEYADETATIVEFLNRWITFCQSIISTLT

SEQ ID NO: 948 - protein, 133 aa, Homo sapiens
  IL2_K43Q
APTSSSTKKTQLQLEHLLLDLQMILNGINNYKNPKLTRMLTFQFYMPKKATELKHLQCLEEELKPLEEVLNLAQSKNFHLRPRDLISNINVIVLELKGSETTFMCEYADETATIVEFLNRWITFCQSIISTLT

SEQ ID NO: 949 - protein, 133 aa, Homo sapiens
  IL2_Y45H
APTSSSTKKTQLQLEHLLLDLQMILNGINNYKNPKLTRMLTFKFHMPKKATELKHLQCLEEELKPLEEVLNLAQSKNFHLRPRDLISNINVIVLELKGSETTFMCEYADETATIVEFLNRWITFCQSIISTLT

SEQ ID NO: 950 - protein, 133 aa, Homo sapiens
  IL2_Y45I
APTSSSTKKTQLQLEHLLLDLQMILNGINNYKNPKLTRMLTFKFIMPKKATELKHLQCLEEELKPLEEVLNLAQSKNFHLRPRDLISNINVIVLELKGSETTFMCEYADETATIVEFLNRWITFCQSIISTLT

SEQ ID NO: 951 - protein, 133 aa, Homo sapiens
  IL2_K48N
APTSSSTKKTQLQLEHLLLDLQMILNGINNYKNPKLTRMLTFKFYMPNKATELKHLQCLEEELKPLEEVLNLAQSKNFHLRPRDLISNINVIVLELKGSETTFMCEYADETATIVEFLNRWITFCQSIISTLT

SEQ ID NO: 952 - protein, 133 aa, Homo sapiens
  IL2_K48Q
APTSSSTKKTQLQLEHLLLDLQMILNGINNYKNPKLTRMLTFKFYMPQKATELKHLQCLEEELKPLEEVLNLAQSKNFHLRPRDLISNINVIVLELKGSETTFMCEYADETATIVEFLNRWITFCQSIISTLT

SEQ ID NO: 953 - protein, 133 aa, Homo sapiens
  IL2_K49N
APTSSSTKKTQLQLEHLLLDLQMILNGINNYKNPKLTRMLTFKFYMPKNATELKHLQCLEEELKPLEEVLNLAQSKNFHLRPRDLISNINVIVLELKGSETTFMCEYADETATIVEFLNRWITFCQSIISTLT

SEQ ID NO: 954 - protein, 133 aa, Homo sapiens
  IL2_K49Q
APTSSSTKKTQLQLEHLLLDLQMILNGINNYKNPKLTRMLTFKFYMPKQATELKHLQCLEEELKPLEEVLNLAQSKNFHLRPRDLISNINVIVLELKGSETTFMCEYADETATIVEFLNRWITFCQSIISTLT

SEQ ID NO: 955 - protein, 133 aa, Homo sapiens
  IL2_E52N
APTSSSTKKTQLQLEHLLLDLQMILNGINNYKNPKLTRMLTFKFYMPKKATNLKHLQCLEEELKPLEEVLNLAQSKNFHLRPRDLISNINVIVLELKGSETTFMCEYADETATIVEFLNRWITFCQSIISTLT

SEQ ID NO: 956 - protein, 133 aa, Homo sapiens
  IL2_E52Q
APTSSSTKKTQLQLEHLLLDLQMILNGINNYKNPKLTRMLTFKFYMPKKATQLKHLQCLEEELKPLEEVLNLAQSKNFHLRPRDLISNINVIVLELKGSETTFMCEYADETATIVEFLNRWITFCQSIISTLT

SEQ ID NO: 957 - protein, 133 aa, Homo sapiens
  IL2_E52H
APTSSSTKKTQLQLEHLLLDLQMILNGINNYKNPKLTRMLTFKFYMPKKATHLKHLQCLEEELKPLEEVLNLAQSKNFHLRPRDLISNINVIVLELKGSETTFMCEYADETATIVEFLNRWITFCQSIISTLT

SEQ ID NO: 958 - protein, 133 aa, Homo sapiens
  IL2_L53I
APTSSSTKKTQLQLEHLLLDLQMILNGINNYKNPKLTRMLTFKFYMPKKATEIKHLQCLEEELKPLEEVLNLAQSKNFHLRPRDLISNINVIVLELKGSETTFMCEYADETATIVEFLNRWITFCQSIISTLT

SEQ ID NO: 959 - protein, 133 aa, Homo sapiens
  IL2_L53V
APTSSSTKKTQLQLEHLLLDLQMILNGINNYKNPKLTRMLTFKFYMPKKATEVKHLQCLEEELKPLEEVLNLAQSKNFHLRPRDLISNINVIVLELKGSETTFMCEYADETATIVEFLNRWITFCQSIISTLT

SEQ ID NO: 960 - protein, 133 aa, Homo sapiens
  IL2_E60N
APTSSSTKKTQLQLEHLLLDLQMILNGINNYKNPKLTRMLTFKFYMPKKATELKHLQCLNEELKPLEEVLNLAQSKNFHLRPRDLISNINVIVLELKGSETTFMCEYADETATIVEFLNRWITFCQSIISTLT

SEQ ID NO: 961 - protein, 133 aa, Homo sapiens
  IL2_E60Q
APTSSSTKKTQLQLEHLLLDLQMILNGINNYKNPKLTRMLTFKFYMPKKATELKHLQCLQEELKPLEEVLNLAQSKNFHLRPRDLISNINVIVLELKGSETTFMCEYADETATIVEFLNRWITFCQSIISTLT

SEQ ID NO: 962 - protein, 133 aa, Homo sapiens
  IL2_E60H
APTSSSTKKTQLQLEHLLLDLQMILNGINNYKNPKLTRMLTFKFYMPKKATELKHLQCLHEELKPLEEVLNLAQSKNFHLRPRDLISNINVIVLELKGSETTFMCEYADETATIVEFLNRWITFCQSIISTLT

SEQ ID NO: 963 - protein, 133 aa, Homo sapiens
  IL2_E61N
APTSSSTKKTQLQLEHLLLDLQMILNGINNYKNPKLTRMLTFKFYMPKKATELKHLQCLENELKPLEEVLNLAQSKNFHLRPRDLISNINVIVLELKGSETTFMCEYADETATIVEFLNRWITFCQSIISTLT

SEQ ID NO: 964 - protein, 133 aa, Homo sapiens
  IL2_E61Q
APTSSSTKKTQLQLEHLLLDLQMILNGINNYKNPKLTRMLTFKFYMPKKATELKHLQCLEQELKPLEEVLNLAQSKNFHLRPRDLISNINVIVLELKGSETTFMCEYADETATIVEFLNRWITFCQSIISTLT

SEQ ID NO: 965 - protein, 133 aa, Homo sapiens
  IL2_E61H
APTSSSTKKTQLQLEHLLLDLQMILNGINNYKNPKLTRMLTFKFYMPKKATELKHLQCLEHELKPLEEVLNLAQSKNFHLRPRDLISNINVIVLELKGSETTFMCEYADETATIVEFLNRWITFCQSIISTLT

SEQ ID NO: 966 - protein, 133 aa, Homo sapiens
  IL2_P65A
APTSSSTKKTQLQLEHLLLDLQMILNGINNYKNPKLTRMLTFKFYMPKKATELKHLQCLEEELKALEEVLNLAQSKNFHLRPRDLISNINVIVLELKGSETTFMCEYADETATIVEFLNRWITFCQSIISTLT

SEQ ID NO: 967 - protein, 133 aa, Homo sapiens
  IL2_P65S
APTSSSTKKTQLQLEHLLLDLQMILNGINNYKNPKLTRMLTFKFYMPKKATELKHLQCLEEELKSLEEVLNLAQSKNFHLRPRDLISNINVIVLELKGSETTFMCEYADETATIVEFLNRWITFCQSIISTLT

SEQ ID NO: 968 - protein, 133 aa, Homo sapiens
  IL2_E67N
APTSSSTKKTQLQLEHLLLDLQMILNGINNYKNPKLTRMLTFKFYMPKKATELKHLQCLEEELKPLNEVLNLAQSKNFHLRPRDLISNINVIVLELKGSETTFMCEYADETATIVEFLNRWITFCQSIISTLT

SEQ ID NO: 969 - protein, 133 aa, Homo sapiens
  IL2_E67Q
APTSSSTKKTQLQLEHLLLDLQMILNGINNYKNPKLTRMLTFKFYMPKKATELKHLQCLEEELKPLQEVLNLAQSKNFHLRPRDLISNINVIVLELKGSETTFMCEYADETATIVEFLNRWITFCQSIISTLT

SEQ ID NO: 970 - protein, 133 aa, Homo sapiens
  IL2_E67H
APTSSSTKKTQLQLEHLLLDLQMILNGINNYKNPKLTRMLTFKFYMPKKATELKHLQCLEEELKPLHEVLNLAQSKNFHLRPRDLISNINVIVLELKGSETTFMCEYADETATIVEFLNRWITFCQSIISTLT

SEQ ID NO: 971 - protein, 133 aa, Homo sapiens
  IL2_E68N
APTSSSTKKTQLQLEHLLLDLQMILNGINNYKNPKLTRMLTFKFYMPKKATELKHLQCLEEELKPLENVLNLAQSKNFHLRPRDLISNINVIVLELKGSETTFMCEYADETATIVEFLNRWITFCQSIISTLT

SEQ ID NO: 972 - protein, 133 aa, Homo sapiens
  IL2_E68Q
APTSSSTKKTQLQLEHLLLDLQMILNGINNYKNPKLTRMLTFKFYMPKKATELKHLQCLEEELKPLEQVLNLAQSKNFHLRPRDLISNINVIVLELKGSETTFMCEYADETATIVEFLNRWITFCQSIISTLT

SEQ ID NO: 973 - protein, 133 aa, Homo sapiens
  IL2_E68H
APTSSSTKKTQLQLEHLLLDLQMILNGINNYKNPKLTRMLTFKFYMPKKATELKHLQCLEEELKPLEHVLNLAQSKNFHLRPRDLISNINVIVLELKGSETTFMCEYADETATIVEFLNRWITFCQSIISTLT

SEQ ID NO: 974 - protein, 133 aa, Homo sapiens
  IL2_L72I
APTSSSTKKTQLQLEHLLLDLQMILNGINNYKNPKLTRMLTFKFYMPKKATELKHLQCLEEELKPLEEVLNIAQSKNFHLRPRDLISNINVIVLELKGSETTFMCEYADETATIVEFLNRWITFCQSIISTLT

SEQ ID NO: 975 - protein, 133 aa, Homo sapiens
  IL2_L72V
APTSSSTKKTQLQLEHLLLDLQMILNGINNYKNPKLTRMLTFKFYMPKKATELKHLQCLEEELKPLEEVLNVAQSKNFHLRPRDLISNINVIVLELKGSETTFMCEYADETATIVEFLNRWITFCQSIISTLT

SEQ ID NO: 976 - protein, 133 aa, Homo sapiens
  IL2_E100N
APTSSSTKKTQLQLEHLLLDLQMILNGINNYKNPKLTRMLTFKFYMPKKATELKHLQCLEEELKPLEEVLNLAQSKNFHLRPRDLISNINVIVLELKGSNTTFMCEYADETATIVEFLNRWITFCQSIISTLT

SEQ ID NO: 977 - protein, 133 aa, Homo sapiens
  IL2_E100Q
APTSSSTKKTQLQLEHLLLDLQMILNGINNYKNPKLTRMLTFKFYMPKKATELKHLQCLEEELKPLEEVLNLAQSKNFHLRPRDLISNINVIVLELKGSQTTFMCEYADETATIVEFLNRWITFCQSIISTLT

SEQ ID NO: 978 - protein, 133 aa, Homo sapiens
  IL2_E100H
APTSSSTKKTQLQLEHLLLDLQMILNGINNYKNPKLTRMLTFKFYMPKKATELKHLQCLEEELKPLEEVLNLAQSKNFHLRPRDLISNINVIVLELKGSHTTFMCEYADETATIVEFLNRWITFCQSIISTLT

SEQ ID NO: 979 - protein, 133 aa, Homo sapiens
  IL2_F103I
APTSSSTKKTQLQLEHLLLDLQMILNGINNYKNPKLTRMLTFKFYMPKKATELKHLQCLEEELKPLEEVLNLAQSKNFHLRPRDLISNINVIVLELKGSETTIMCEYADETATIVEFLNRWITFCQSIISTLT

SEQ ID NO: 980 - protein, 133 aa, Homo sapiens
  IL2_F103V
APTSSSTKKTQLQLEHLLLDLQMILNGINNYKNPKLTRMLTFKFYMPKKATELKHLQCLEEELKPLEEVLNLAQSKNFHLRPRDLISNINVIVLELKGSETTVMCEYADETATIVEFLNRWITFCQSIISTLT

SEQ ID NO: 981 - protein, 133 aa, Homo sapiens
  IL2_M104I
APTSSSTKKTQLQLEHLLLDLQMILNGINNYKNPKLTRMLTFKFYMPKKATELKHLQCLEEELKPLEEVLNLAQSKNFHLRPRDLISNINVIVLELKGSETTFICEYADETATIVEFLNRWITFCQSIISTLT

SEQ ID NO: 982 - protein, 133 aa, Homo sapiens
  IL2_M104V
APTSSSTKKTQLQLEHLLLDLQMILNGINNYKNPKLTRMLTFKFYMPKKATELKHLQCLEEELKPLEEVLNLAQSKNFHLRPRDLISNINVIVLELKGSETTFVCEYADETATIVEFLNRWITFCQSIISTLT

SEQ ID NO: 983 - protein, 133 aa, Homo sapiens
  IL2_E106N
APTSSSTKKTQLQLEHLLLDLQMILNGINNYKNPKLTRMLTFKFYMPKKATELKHLQCLEEELKPLEEVLNLAQSKNFHLRPRDLISNINVIVLELKGSETTFMCNYADETATIVEFLNRWITFCQSIISTLT

SEQ ID NO: 984 - protein, 133 aa, Homo sapiens
  IL2_E106Q
APTSSSTKKTQLQLEHLLLDLQMILNGINNYKNPKLTRMLTFKFYMPKKATELKHLQCLEEELKPLEEVLNLAQSKNFHLRPRDLISNINVIVLELKGSETTFMCQYADETATIVEFLNRWITFCQSIISTLT

SEQ ID NO: 985 - protein, 133 aa, Homo sapiens
  IL2_E106H
APTSSSTKKTQLQLEHLLLDLQMILNGINNYKNPKLTRMLTFKFYMPKKATELKHLQCLEEELKPLEEVLNLAQSKNFHLRPRDLISNINVIVLELKGSETTFMCHYADETATIVEFLNRWITFCQSIISTLT

SEQ ID NO: 986 - protein, 133 aa, Homo sapiens
  IL2_Y107H
APTSSSTKKTQLQLEHLLLDLQMILNGINNYKNPKLTRMLTFKFYMPKKATELKHLQCLEEELKPLEEVLNLAQSKNFHLRPRDLISNINVIVLELKGSETTFMCEHADETATIVEFLNRWITFCQSIISTLT

SEQ ID NO: 987 - protein, 133 aa, Homo sapiens
  IL2_Y107I
APTSSSTKKTQLQLEHLLLDLQMILNGINNYKNPKLTRMLTFKFYMPKKATELKHLQCLEEELKPLEEVLNLAQSKNFHLRPRDLISNINVIVLELKGSETTFMCEIADETATIVEFLNRWITFCQSIISTLT

SEQ ID NO: 988 - protein, 133 aa, Homo sapiens
  IL2_D109N
APTSSSTKKTQLQLEHLLLDLQMILNGINNYKNPKLTRMLTFKFYMPKKATELKHLQCLEEELKPLEEVLNLAQSKNFHLRPRDLISNINVIVLELKGSETTFMCEYANETATIVEFLNRWITFCQSIISTLT

SEQ ID NO: 989 - protein, 133 aa, Homo sapiens
  IL2_D109Q
APTSSSTKKTQLQLEHLLLDLQMILNGINNYKNPKLTRMLTFKFYMPKKATELKHLQCLEEELKPLEEVLNLAQSKNFHLRPRDLISNINVIVLELKGSETTFMCEYAQETATIVEFLNRWITFCQSIISTLT

SEQ ID NO: 990 - protein, 133 aa, Homo sapiens
  IL2_E110N
APTSSSTKKTQLQLEHLLLDLQMILNGINNYKNPKLTRMLTFKFYMPKKATELKHLQCLEEELKPLEEVLNLAQSKNFHLRPRDLISNINVIVLELKGSETTFMCEYADNTATIVEFLNRWITFCQSIISTLT

SEQ ID NO: 991 - protein, 133 aa, Homo sapiens
  IL2_E110Q
APTSSSTKKTQLQLEHLLLDLQMILNGINNYKNPKLTRMLTFKFYMPKKATELKHLQCLEEELKPLEEVLNLAQSKNFHLRPRDLISNINVIVLELKGSETTFMCEYADQTATIVEFLNRWITFCQSIISTLT

SEQ ID NO: 992 - protein, 133 aa, Homo sapiens
  IL2_E110H
APTSSSTKKTQLQLEHLLLDLQMILNGINNYKNPKLTRMLTFKFYMPKKATELKHLQCLEEELKPLEEVLNLAQSKNFHLRPRDLISNINVIVLELKGSETTFMCEYADHTATIVEFLNRWITFCQSIISTLT

SEQ ID NO: 993 - protein, 133 aa, Homo sapiens
  IL2_L132I
APTSSSTKKTQLQLEHLLLDLQMILNGINNYKNPKLTRMLTFKFYMPKKATELKHLQCLEEELKPLEEVLNLAQSKNFHLRPRDLISNINVIVLELKGSETTFMCEYADETATIVEFLNRWITFCQSIISTIT

SEQ ID NO: 994 - protein, 133 aa, Homo sapiens
  IL2_L132V
APTSSSTKKTQLQLEHLLLDLQMILNGINNYKNPKLTRMLTFKFYMPKKATELKHLQCLEEELKPLEEVLNLAQSKNFHLRPRDLISNINVIVLELKGSETTFMCEYADETATIVEFLNRWITFCQSIISTVT

SEQ ID NO: 995 - protein, 133 aa, Homo sapiens
  IL3_WT
APMTQTTPLKTSWVNCSNMIDEIITHLKQPPLPLLDFNNLNGEDQDILMENNLRRPNLEAFNRAVKSLQNASAIESILKNLLPCLPLATAAPTRHPIHIKDGDWNEFRRKLTFYLKTLENAQAQQTTLSLAIF

SEQ ID NO: 996 - protein, 133 aa, Homo sapiens
  IL3_F37I
APMTQTTPLKTSWVNCSNMIDEIITHLKQPPLPLLDINNLNGEDQDILMENNLRRPNLEAFNRAVKSLQNASAIESILKNLLPCLPLATAAPTRHPIHIKDGDWNEFRRKLTFYLKTLENAQAQQTTLSLAIF

SEQ ID NO: 997 - protein, 133 aa, Homo sapiens
  IL3_F37V
APMTQTTPLKTSWVNCSNMIDEIITHLKQPPLPLLDVNNLNGEDQDILMENNLRRPNLEAFNRAVKSLQNASAIESILKNLLPCLPLATAAPTRHPIHIKDGDWNEFRRKLTFYLKTLENAQAQQTTLSLAIF

SEQ ID NO: 998 - protein, 133 aa, Homo sapiens
  IL3_E43N
APMTQTTPLKTSWVNCSNMIDEIITHLKQPPLPLLDFNNLNGNDQDILMENNLRRPNLEAFNRAVKSLQNASAIESILKNLLPCLPLATAAPTRHPIHIKDGDWNEFRRKLTFYLKTLENAQAQQTTLSLAIF

SEQ ID NO: 999 - protein, 133 aa, Homo sapiens
  IL3_E43Q
APMTQTTPLKTSWVNCSNMIDEIITHLKQPPLPLLDFNNLNGQDQDILMENNLRRPNLEAFNRAVKSLQNASAIESILKNLLPCLPLATAAPTRHPIHIKDGDWNEFRRKLTFYLKTLENAQAQQTTLSLAIF

SEQ ID NO: 1000 - protein, 133 aa, Homo sapiens
  IL3_E43H
APMTQTTPLKTSWVNCSNMIDEIITHLKQPPLPLLDFNNLNGHDQDILMENNLRRPNLEAFNRAVKSLQNASAIESILKNLLPCLPLATAAPTRHPIHIKDGDWNEFRRKLTFYLKTLENAQAQQTTLSLAIF

SEQ ID NO: 1001 - protein, 133 aa, Homo sapiens
  IL3_D46N
APMTQTTPLKTSWVNCSNMIDEIITHLKQPPLPLLDFNNLNGEDQNILMENNLRRPNLEAFNRAVKSLQNASAIESILKNLLPCLPLATAAPTRHPIHIKDGDWNEFRRKLTFYLKTLENAQAQQTTLSLAIF

SEQ ID NO: 1002 - protein, 133 aa, Homo sapiens
  IL3_D46Q
APMTQTTPLKTSWVNCSNMIDEIITHLKQPPLPLLDFNNLNGEDQQILMENNLRRPNLEAFNRAVKSLQNASAIESILKNLLPCLPLATAAPTRHPIHIKDGDWNEFRRKLTFYLKTLENAQAQQTTLSLAIF

SEQ ID NO: 1003 - protein, 133 aa, Homo sapiens
  IL3_E59N
APMTQTTPLKTSWVNCSNMIDEIITHLKQPPLPLLDFNNLNGEDQDILMENNLRRPNLNAFNRAVKSLQNASAIESILKNLLPCLPLATAAPTRHPIHIKDGDWNEFRRKLTFYLKTLENAQAQQTTLSLAIF

SEQ ID NO: 1004 - protein, 133 aa, Homo sapiens
  IL3_E59Q
APMTQTTPLKTSWVNCSNMIDEIITHLKQPPLPLLDFNNLNGEDQDILMENNLRRPNLQAFNRAVKSLQNASAIESILKNLLPCLPLATAAPTRHPIHIKDGDWNEFRRKLTFYLKTLENAQAQQTTLSLAIF

SEQ ID NO: 1005 - protein, 133 aa, Homo sapiens
  IL3_E59H
APMTQTTPLKTSWVNCSNMIDEIITHLKQPPLPLLDFNNLNGEDQDILMENNLRRPNLHAFNRAVKSLQNASAIESILKNLLPCLPLATAAPTRHPIHIKDGDWNEFRRKLTFYLKTLENAQAQQTTLSLAIF

SEQ ID NO: 1006 - protein, 133 aa, Homo sapiens
  IL3_R63H
APMTQTTPLKTSWVNCSNMIDEIITHLKQPPLPLLDFNNLNGEDQDILMENNLRRPNLEAFNHAVKSLQNASAIESILKNLLPCLPLATAAPTRHPIHIKDGDWNEFRRKLTFYLKTLENAQAQQTTLSLAIF

SEQ ID NO: 1007 - protein, 133 aa, Homo sapiens
  IL3_R63Q
APMTQTTPLKTSWVNCSNMIDEIITHLKQPPLPLLDFNNLNGEDQDILMENNLRRPNLEAFNQAVKSLQNASAIESILKNLLPCLPLATAAPTRHPIHIKDGDWNEFRRKLTFYLKTLENAQAQQTTLSLAIF

SEQ ID NO: 1008 - protein, 133 aa, Homo sapiens
  IL3_K66N
APMTQTTPLKTSWVNCSNMIDEIITHLKQPPLPLLDFNNLNGEDQDILMENNLRRPNLEAFNRAVNSLQNASAIESILKNLLPCLPLATAAPTRHPIHIKDGDWNEFRRKLTFYLKTLENAQAQQTTLSLAIF

SEQ ID NO: 1009 - protein, 133 aa, Homo sapiens
  IL3_K66Q
APMTQTTPLKTSWVNCSNMIDEIITHLKQPPLPLLDFNNLNGEDQDILMENNLRRPNLEAFNRAVQSLQNASAIESILKNLLPCLPLATAAPTRHPIHIKDGDWNEFRRKLTFYLKTLENAQAQQTTLSLAIF

SEQ ID NO: 1010 - protein, 133 aa, Homo sapiens
  IL3_P96A
APMTQTTPLKTSWVNCSNMIDEIITHLKQPPLPLLDFNNLNGEDQDILMENNLRRPNLEAFNRAVKSLQNASAIESILKNLLPCLPLATAAPTRHAIHIKDGDWNEFRRKLTFYLKTLENAQAQQTTLSLAIF

SEQ ID NO: 1011 - protein, 133 aa, Homo sapiens
  IL3_P96S
APMTQTTPLKTSWVNCSNMIDEIITHLKQPPLPLLDFNNLNGEDQDILMENNLRRPNLEAFNRAVKSLQNASAIESILKNLLPCLPLATAAPTRHSIHIKDGDWNEFRRKLTFYLKTLENAQAQQTTLSLAIF

SEQ ID NO: 1012 - protein, 133 aa, Homo sapiens
  IL3_K100N
APMTQTTPLKTSWVNCSNMIDEIITHLKQPPLPLLDFNNLNGEDQDILMENNLRRPNLEAFNRAVKSLQNASAIESILKNLLPCLPLATAAPTRHPIHINDGDWNEFRRKLTFYLKTLENAQAQQTTLSLAIF

SEQ ID NO: 1013 - protein, 133 aa, Homo sapiens
  IL3_K100Q
APMTQTTPLKTSWVNCSNMIDEIITHLKQPPLPLLDFNNLNGEDQDILMENNLRRPNLEAFNRAVKSLQNASAIESILKNLLPCLPLATAAPTRHPIHIQDGDWNEFRRKLTFYLKTLENAQAQQTTLSLAIF

SEQ ID NO: 1014 - protein, 133 aa, Homo sapiens
  IL3_D101N
APMTQTTPLKTSWVNCSNMIDEIITHLKQPPLPLLDFNNLNGEDQDILMENNLRRPNLEAFNRAVKSLQNASAIESILKNLLPCLPLATAAPTRHPIHIKNGDWNEFRRKLTFYLKTLENAQAQQTTLSLAIF

SEQ ID NO: 1015 - protein, 133 aa, Homo sapiens
  IL3_D101Q
APMTQTTPLKTSWVNCSNMIDEIITHLKQPPLPLLDFNNLNGEDQDILMENNLRRPNLEAFNRAVKSLQNASAIESILKNLLPCLPLATAAPTRHPIHIKQGDWNEFRRKLTFYLKTLENAQAQQTTLSLAIF

SEQ ID NO: 1016 - protein, 133 aa, Homo sapiens
  IL3_D103N
APMTQTTPLKTSWVNCSNMIDEIITHLKQPPLPLLDFNNLNGEDQDILMENNLRRPNLEAFNRAVKSLQNASAIESILKNLLPCLPLATAAPTRHPIHIKDGNWNEFRRKLTFYLKTLENAQAQQTTLSLAIF

SEQ ID NO: 1017 - protein, 133 aa, Homo sapiens
  IL3_D103Q
APMTQTTPLKTSWVNCSNMIDEIITHLKQPPLPLLDFNNLNGEDQDILMENNLRRPNLEAFNRAVKSLQNASAIESILKNLLPCLPLATAAPTRHPIHIKDGQWNEFRRKLTFYLKTLENAQAQQTTLSLAIF

SEQ ID NO: 1018 - protein, 129 aa, Homo sapiens [sequence omitted]

SEQ ID NO: 1019 - protein, 129 aa, Homo sapiens
  IL4_E26N
HKCDITLQEIIKTLNSLTEQKTLCTNLTVTDIFAASKNTTEKETFCRAATVLRQFYSHHEKDTRCLGATAQQFHRHKQLIRFLKRLDRNLWGLAGLNSCPVKEANQSTLENFLERLKTIMREKYSKCSS

SEQ ID NO: 1020 - protein, 129 aa, Homo sapiens
  IL4_E26Q
HKCDITLQEIIKTLNSLTEQKTLCTQLTVTDIFAASKNTTEKETFCRAATVLRQFYSHHEKDTRCLGATAQQFHRHKQLIRFLKRLDRNLWGLAGLNSCPVKEANQSTLENFLERLKTIMREKYSKCSS

SEQ ID NO: 1021 - protein, 129 aa, Homo sapiens
  IL4_E26H
HKCDITLQEIIKTLNSLTEQKTLCTHLTVTDIFAASKNTTEKETFCRAATVLRQFYSHHEKDTRCLGATAQQFHRHKQLIRFLKRLDRNLWGLAGLNSCPVKEANQSTLENFLERLKTIMREKYSKCSS

SEQ ID NO: 1022 - protein, 129 aa, Homo sapiens
  IL4_K37N
HKCDITLQEIIKTLNSLTEQKTLCTELTVTDIFAASNNTTEKETFCRAATVLRQFYSHHEKDTRCLGATAQQFHRHKQLIRFLKRLDRNLWGLAGLNSCPVKEANQSTLENFLERLKTIMREKYSKCSS

SEQ ID NO: 1023 - protein, 129 aa, Homo sapiens
  IL4_K37Q
HKCDITLQEIIKTLNSLTEQKTLCTELTVTDIFAASQNTTEKETFCRAATVLRQFYSHHEKDTRCLGATAQQFHRHKQLIRFLKRLDRNLWGLAGLNSCPVKEANQSTLENFLERLKTIMREKYSKCSS

SEQ ID NO: 1024 - protein, 129 aa, Homo sapiens
  IL4_R53H
HKCDITLQEIIKTLNSLTEQKTLCTELTVTDIFAASKNTTEKETFCRAATVLHQFYSHHEKDTRCLGATAQQFHRHKQLIRFLKRLDRNLWGLAGLNSCPVKEANQSTLENFLERLKTIMREKYSKCSS

SEQ ID NO: 1025 - protein, 129 aa, Homo sapiens
  IL4_R53Q
HKCDITLQEIIKTLNSLTEQKTLCTELTVTDIFAASKNTTEKETFCRAATVLQQFYSHHEKDTRCLGATAQQFHRHKQLIRFLKRLDRNLWGLAGLNSCPVKEANQSTLENFLERLKTIMREKYSKCSS

SEQ ID NO: 1026 - protein, 129 aa, Homo sapiens
  IL4_E60N
HKCDITLQEIIKTLNSLTEQKTLCTELTVTDIFAASKNTTEKETFCRAATVLRQFYSHHNKDTRCLGATAQQFHRHKQLIRFLKRLDRNLWGLAGLNSCPVKEANQSTLENFLERLKTIMREKYSKCSS

SEQ ID NO: 1027 - protein, 129 aa, Homo sapiens
  IL4_E60Q
HKCDITLQEIIKTLNSLTEQKTLCTELTVTDIFAASKNTTEKETFCRAATVLRQFYSHHQKDTRCLGATAQQFHRHKQLIRFLKRLDRNLWGLAGLNSCPVKEANQSTLENFLERLKTIMREKYSKCSS

SEQ ID NO: 1028 - protein, 129 aa, Homo sapiens
  IL4_E60H
HKCDITLQEIIKTLNSLTEQKTLCTELTVTDIFAASKNTTEKETFCRAATVLRQFYSHHHKDTRCLGATAQQFHRHKQLIRFLKRLDRNLWGLAGLNSCPVKEANQSTLENFLERLKTIMREKYSKCSS

SEQ ID NO: 1029 - protein, 129 aa, Homo sapiens
  IL4_K61N
HKCDITLQEIIKTLNSLTEQKTLCTELTVTDIFAASKNTTEKETFCRAATVLRQFYSHHENDTRCLGATAQQFHRHKQLIRFLKRLDRNLWGLAGLNSCPVKEANQSTLENFLERLKTIMREKYSKCSS

SEQ ID NO: 1030 - protein, 129 aa, Homo sapiens
  IL4_K61Q
HKCDITLQEIIKTLNSLTEQKTLCTELTVTDIFAASKNTTEKETFCRAATVLRQFYSHHEQDTRCLGATAQQFHRHKQLIRFLKRLDRNLWGLAGLNSCPVKEANQSTLENFLERLKTIMREKYSKCSS

SEQ ID NO: 1031 - protein, 129 aa, Homo sapiens
  IL4_R64H
HKCDITLQEIIKTLNSLTEQKTLCTELTVTDIFAASKNTTEKETFCRAATVLRQFYSHHEKDTHCLGATAQQFHRHKQLIRFLKRLDRNLWGLAGLNSCPVKEANQSTLENFLERLKTIMREKYSKCSS

SEQ ID NO: 1032 - protein, 129 aa, Homo sapiens
  IL4_R64Q
HKCDITLQEIIKTLNSLTEQKTLCTELTVTDIFAASKNTTEKETFCRAATVLRQFYSHHEKDTQCLGATAQQFHRHKQLIRFLKRLDRNLWGLAGLNSCPVKEANQSTLENFLERLKTIMREKYSKCSS

SEQ ID NO: 1033 - protein, 129 aa, Homo sapiens
  IL4_L66I
HKCDITLQEIIKTLNSLTEQKTLCTELTVTDIFAASKNTTEKETFCRAATVLRQFYSHHEKDTRCIGATAQQFHRHKQLIRFLKRLDRNLWGLAGLNSCPVKEANQSTLENFLERLKTIMREKYSKCSS

SEQ ID NO: 1034 - protein, 129 aa, Homo sapiens
  IL4_L66V
HKCDITLQEIIKTLNSLTEQKTLCTELTVTDIFAASKNTTEKETFCRAATVLRQFYSHHEKDTRCVGATAQQFHRHKQLIRFLKRLDRNLWGLAGLNSCPVKEANQSTLENFLERLKTIMREKYSKCSS

SEQ ID NO: 1035 - protein, 129 aa, Homo sapiens
  IL4_P100A
HKCDITLQEIIKTLNSLTEQKTLCTELTVTDIFAASKNTTEKETFCRAATVLRQFYSHHEKDTRCLGATAQQFHRHKQLIRFLKRLDRNLWGLAGLNSCAVKEANQSTLENFLERLKTIMREKYSKCSS

SEQ ID NO: 1036 - protein, 129 aa, Homo sapiens
  IL4_P100S
HKCDITLQEIIKTLNSLTEQKTLCTELTVTDIFAASKNTTEKETFCRAATVLRQFYSHHEKDTRCLGATAQQFHRHKQLIRFLKRLDRNLWGLAGLNSCSVKEANQSTLENFLERLKTIMREKYSKCSS

SEQ ID NO: 1037 - protein, 129 aa, Homo sapiens
  IL4_K102N
HKCDITLQEIIKTLNSLTEQKTLCTELTVTDIFAASKNTTEKETFCRAATVLRQFYSHHEKDTRCLGATAQQFHRHKQLIRFLKRLDRNLWGLAGLNSCPVNEANQSTLENFLERLKTIMREKYSKCSS

SEQ ID NO: 1038 - protein, 129 aa, Homo sapiens
  IL4_K102Q
HKCDITLQEIIKTLNSLTEQKTLCTELTVTDIFAASKNTTEKETFCRAATVLRQFYSHHEKDTRCLGATAQQFHRHKQLIRFLKRLDRNLWGLAGLNSCPVQEANQSTLENFLERLKTIMREKYSKCSS

SEQ ID NO: 1039 - protein, 129 aa, Homo sapiens
  IL4_E103N
HKCDITLQEIIKTLNSLTEQKTLCTELTVTDIFAASKNTTEKETFCRAATVLRQFYSHHEKDTRCLGATAQQFHRHKQLIRFLKRLDRNLWGLAGLNSCPVKNANQSTLENFLERLKTIMREKYSKCSS

SEQ ID NO: 1040 - protein, 129 aa, Homo sapiens
  IL4_E103Q
HKCDITLQEIIKTLNSLTEQKTLCTELTVTDIFAASKNTTEKETFCRAATVLRQFYSHHEKDTRCLGATAQQFHRHKQLIRFLKRLDRNLWGLAGLNSCPVKQANQSTLENFLERLKTIMREKYSKCSS

SEQ ID NO: 1041 - protein, 129 aa, Homo sapiens
  IL4_E103H
HKCDITLQEIIKTLNSLTEQKTLCTELTVTDIFAASKNTTEKETFCRAATVLRQFYSHHEKDTRCLGATAQQFHRHKQLIRFLKRLDRNLWGLAGLNSCPVKHANQSTLENFLERLKTIMREKYSKCSS

SEQ ID NO: 1042 - protein, 129 aa, Homo sapiens
  IL4_K126N
HKCDITLQEIIKTLNSLTEQKTLCTELTVTDIFAASKNTTEKETFCRAATVLRQFYSHHEKDTRCLGATAQQFHRHKQLIRFLKRLDRNLWGLAGLNSCPVKEANQSTLENFLERLKTIMREKYSNCSS

SEQ ID NO: 1043 - protein, 129 aa, Homo sapiens
  IL4_K126Q
HKCDITLQEIIKTLNSLTEQKTLCTELTVTDIFAASKNTTEKETFCRAATVLRQFYSHHEKDTRCLGATAQQFHRHKQLIRFLKRLDRNLWGLAGLNSCPVKEANQSTLENFLERLKTIMREKYSQCSS

SEQ ID NO: 1044 - protein, 115 aa, Homo sapiens
  IL5_WT
IPTEIPTSALVKETLALLSTHRTLLIANETLRIPVPVHKNHQLCTEEIFQGIGTLESQTVQGGTVERLFKNLSLIKKYIDGQKKKCGEERRRVNQFLDYLQEFLGVMNTEWIIES

SEQ ID NO: 1045 - protein, 115 aa, Homo sapiens
  IL5_R32H
IPTEIPTSALVKETLALLSTHRTLLIANETLHIPVPVHKNHQLCTEEIFQGIGTLESQTVQGGTVERLFKNLSLIKKYIDGQKKKCGEERRRVNQFLDYLQEFLGVMNTEWIIES

SEQ ID NO: 1046 - protein, 115 aa, Homo sapiens
  IL5_R32Q
IPTEIPTSALVKETLALLSTHRTLLIANETLQIPVPVHKNHQLCTEEIFQGIGTLESQTVQGGTVERLFKNLSLIKKYIDGQKKKCGEERRRVNQFLDYLQEFLGVMNTEWIIES

SEQ ID NO: 1047 - protein, 115 aa, Homo sapiens
  IL5_P34A
IPTEIPTSALVKETLALLSTHRTLLIANETLRIAVPVHKNHQLCTEEIFQGIGTLESQTVQGGTVERLFKNLSLIKKYIDGQKKKCGEERRRVNQFLDYLQEFLGVMNTEWIIES

SEQ ID NO: 1048 - protein, 115 aa, Homo sapiens
  IL5_P34S
IPTEIPTSALVKETLALLSTHRTLLIANETLRISVPVHKNHQLCTEEIFQGIGTLESQTVQGGTVERLFKNLSLIKKYIDGQKKKCGEERRRVNQFLDYLQEFLGVMNTEWIIES

SEQ ID NO: 1049 - protein, 115 aa, Homo sapiens
  IL5_K39N
IPTEIPTSALVKETLALLSTHRTLLIANETLRIPVPVHNNHQLCTEEIFQGIGTLESQTVQGGTVERLFKNLSLIKKYIDGQKKKCGEERRRVNQFLDYLQEFLGVMNTEWIIES

SEQ ID NO: 1050 - protein, 115 aa, Homo sapiens
  IL5_K39Q
IPTEIPTSALVKETLALLSTHRTLLIANETLRIPVPVHQNHQLCTEEIFQGIGTLESQTVQGGTVERLFKNLSLIKKYIDGQKKKCGEERRRVNQFLDYLQEFLGVMNTEWIIES

SEQ ID NO: 1051 - protein, 115 aa, Homo sapiens
  IL5_E46N
IPTEIPTSALVKETLALLSTHRTLLIANETLRIPVPVHKNHQLCTNEIFQGIGTLESQTVQGGTVERLFKNLSLIKKYIDGQKKKCGEERRRVNQFLDYLQEFLGVMNTEWIIES

SEQ ID NO: 1052 - protein, 115 aa, Homo sapiens
  IL5_E46Q
IPTEIPTSALVKETLALLSTHRTLLIANETLRIPVPVHKNHQLCTQEIFQGIGTLESQTVQGGTVERLFKNLSLIKKYIDGQKKKCGEERRRVNQFLDYLQEFLGVMNTEWIIES

SEQ ID NO: 1053 - protein, 115 aa, Homo sapiens
  IL5_E46H
IPTEIPTSALVKETLALLSTHRTLLIANETLRIPVPVHKNHQLCTHEIFQGIGTLESQTVQGGTVERLFKNLSLIKKYIDGQKKKCGEERRRVNQFLDYLQEFLGVMNTEWIIES

SEQ ID NO: 1054 - protein, 115 aa, Homo sapiens
  IL5_E47N
IPTEIPTSALVKETLALLSTHRTLLIANETLRIPVPVHKNHQLCTENIFQGIGTLESQTVQGGTVERLFKNLSLIKKYIDGQKKKCGEERRRVNQFLDYLQEFLGVMNTEWIIES

SEQ ID NO: 1055 - protein, 115 aa, Homo sapiens
  IL5_E47Q
IPTEIPTSALVKETLALLSTHRTLLIANETLRIPVPVHKNHQLCTEQIFQGIGTLESQTVQGGTVERLFKNLSLIKKYIDGQKKKCGEERRRVNQFLDYLQEFLGVMNTEWIIES

SEQ ID NO: 1056 - protein, 115 aa, Homo sapiens
  IL5_E47H
IPTEIPTSALVKETLALLSTHRTLLIANETLRIPVPVHKNHQLCTEHIFQGIGTLESQTVQGGTVERLFKNLSLIKKYIDGQKKKCGEERRRVNQFLDYLQEFLGVMNTEWIIES

SEQ ID NO: 1057 - protein, 115 aa, Homo sapiens
  IL5_E56N
IPTEIPTSALVKETLALLSTHRTLLIANETLRIPVPVHKNHQLCTEEIFQGIGTLNSQTVQGGTVERLFKNLSLIKKYIDGQKKKCGEERRRVNQFLDYLQEFLGVMNTEWIIES

SEQ ID NO: 1058 - protein, 115 aa, Homo sapiens
  IL5_E56Q
IPTEIPTSALVKETLALLSTHRTLLIANETLRIPVPVHKNHQLCTEEIFQGIGTLQSQTVQGGTVERLFKNLSLIKKYIDGQKKKCGEERRRVNQFLDYLQEFLGVMNTEWIIES

SEQ ID NO: 1059 - protein, 115 aa, Homo sapiens
  IL5_E56H
IPTEIPTSALVKETLALLSTHRTLLIANETLRIPVPVHKNHQLCTEEIFQGIGTLHSQTVQGGTVERLFKNLSLIKKYIDGQKKKCGEERRRVNQFLDYLQEFLGVMNTEWIIES

SEQ ID NO: 1060 - protein, 115 aa, Homo sapiens
  IL5_K84N
IPTEIPTSALVKETLALLSTHRTLLIANETLRIPVPVHKNHQLCTEEIFQGIGTLESQTVQGGTVERLFKNLSLIKKYIDGQKNKCGEERRRVNQFLDYLQEFLGVMNTEWIIES

SEQ ID NO: 1061 - protein, 115 aa, Homo sapiens
  IL5_K84Q
IPTEIPTSALVKETLALLSTHRTLLIANETLRIPVPVHKNHQLCTEEIFQGIGTLESQTVQGGTVERLFKNLSLIKKYIDGQKQKCGEERRRVNQFLDYLQEFLGVMNTEWIIES

SEQ ID NO: 1062 - protein, 115 aa, Homo sapiens
  IL5_K85N
IPTEIPTSALVKETLALLSTHRTLLIANETLRIPVPVHKNHQLCTEEIFQGIGTLESQTVQGGTVERLFKNLSLIKKYIDGQKKNCGEERRRVNQFLDYLQEFLGVMNTEWIIES

SEQ ID NO: 1063 - protein, 115 aa, Homo sapiens
  IL5_K85Q
IPTEIPTSALVKETLALLSTHRTLLIANETLRIPVPVHKNHQLCTEEIFQGIGTLESQTVQGGTVERLFKNLSLIKKYIDGQKKQCGEERRRVNQFLDYLQEFLGVMNTEWIIES

SEQ ID NO: 1064 - protein, 115 aa, Homo sapiens
  IL5_E88N
IPTEIPTSALVKETLALLSTHRTLLIANETLRIPVPVHKNHQLCTEEIFQGIGTLESQTVQGGTVERLFKNLSLIKKYIDGQKKKCGNERRRVNQFLDYLQEFLGVMNTEWIIES

SEQ ID NO: 1065 - protein, 115 aa, Homo sapiens
  IL5_E88Q
IPTEIPTSALVKETLALLSTHRTLLIANETLRIPVPVHKNHQLCTEEIFQGIGTLESQTVQGGTVERLFKNLSLIKKYIDGQKKKCGQERRRVNQFLDYLQEFLGVMNTEWIIES

SEQ ID NO: 1066 - protein, 115 aa, Homo sapiens
  IL5_E88H
IPTEIPTSALVKETLALLSTHRTLLIANETLRIPVPVHKNHQLCTEEIFQGIGTLESQTVQGGTVERLFKNLSLIKKYIDGQKKKCGHERRRVNQFLDYLQEFLGVMNTEWIIES

SEQ ID NO: 1067 - protein, 115 aa, Homo sapiens
  IL5_E89N
IPTEIPTSALVKETLALLSTHRTLLIANETLRIPVPVHKNHQLCTEEIFQGIGTLESQTVQGGTVERLFKNLSLIKKYIDGQKKKCGENRRRVNQFLDYLQEFLGVMNTEWIIES

SEQ ID NO: 1068 - protein, 115 aa, Homo sapiens
  IL5_E89Q
IPTEIPTSALVKETLALLSTHRTLLIANETLRIPVPVHKNHQLCTEEIFQGIGTLESQTVQGGTVERLFKNLSLIKKYIDGQKKKCGEQRRRVNQFLDYLQEFLGVMNTEWIIES

SEQ ID NO: 1069 - protein, 115 aa, Homo sapiens
  IL5_E89H
IPTEIPTSALVKETLALLSTHRTLLIANETLRIPVPVHKNHQLCTEEIFQGIGTLESQTVQGGTVERLFKNLSLIKKYIDGQKKKCGEHRRRVNQFLDYLQEFLGVMNTEWIIES

SEQ ID NO: 1070 - protein, 115 aa, Homo sapiens
  IL5_R90H
IPTEIPTSALVKETLALLSTHRTLLIANETLRIPVPVHKNHQLCTEEIFQGIGTLESQTVQGGTVERLFKNLSLIKKYIDGQKKKCGEEHRRVNQFLDYLQEFLGVMNTEWIIES

SEQ ID NO: 1071 - protein, 115 aa, Homo sapiens
  IL5_R90Q
IPTEIPTSALVKETLALLSTHRTLLIANETLRIPVPVHKNHQLCTEEIFQGIGTLESQTVQGGTVERLFKNLSLIKKYIDGQKKKCGEEQRRVNQFLDYLQEFLGVMNTEWIIES

SEQ ID NO: 1072 - protein, 115 aa, Homo sapiens
  IL5_E102N
IPTEIPTSALVKETLALLSTHRTLLIANETLRIPVPVHKNHQLCTEEIFQGIGTLESQTVQGGTVERLFKNLSLIKKYIDGQKKKCGEERRRVNQFLDYLQNFLGVMNTEWIIES

SEQ ID NO: 1073 - protein, 115 aa, Homo sapiens
  IL5_E102Q
IPTEIPTSALVKETLALLSTHRTLLIANETLRIPVPVHKNHQLCTEEIFQGIGTLESQTVQGGTVERLFKNLSLIKKYIDGQKKKCGEERRRVNQFLDYLQQFLGVMNTEWIIES

SEQ ID NO: 1074 - protein, 115 aa, Homo sapiens
  IL5_E102H
IPTEIPTSALVKETLALLSTHRTLLIANETLRIPVPVHKNHQLCTEEIFQGIGTLESQTVQGGTVERLFKNLSLIKKYIDGQKKKCGEERRRVNQFLDYLQHFLGVMNTEWIIES

SEQ ID NO: 1075 - protein, 115 aa, Homo sapiens
  IL5_E110N
IPTEIPTSALVKETLALLSTHRTLLIANETLRIPVPVHKNHQLCTEEIFQGIGTLESQTVQGGTVERLFKNLSLIKKYIDGQKKKCGEERRRVNQFLDYLQEFLGVMNTNWIIES

SEQ ID NO: 1076 - protein, 115 aa, Homo sapiens
  IL5_E110Q
IPTEIPTSALVKETLALLSTHRTLLIANETLRIPVPVHKNHQLCTEEIFQGIGTLESQTVQGGTVERLFKNLSLIKKYIDGQKKKCGEERRRVNQFLDYLQEFLGVMNTQWIIES

SEQ ID NO: 1077 - protein, 115 aa, Homo sapiens
  IL5_E110H
IPTEIPTSALVKETLALLSTHRTLLIANETLRIPVPVHKNHQLCTEEIFQGIGTLESQTVQGGTVERLFKNLSLIKKYIDGQKKKCGEERRRVNQFLDYLQEFLGVMNTHWIIES

SEQ ID NO: 1078 - protein, 115 aa, Homo sapiens
  IL5_W111S
IPTEIPTSALVKETLALLSTHRTLLIANETLRIPVPVHKNHQLCTEEIFQGIGTLESQTVQGGTVERLFKNLSLIKKYIDGQKKKCGEERRRVNQFLDYLQEFLGVMNTESIIES

SEQ ID NO: 1079 - protein, 115 aa, Homo sapiens
  IL5_W111H
IPTEIPTSALVKETLALLSTHRTLLIANETLRIPVPVHKNHQLCTEEIFQGIGTLESQTVQGGTVERLFKNLSLIKKYIDGQKKKCGEERRRVNQFLDYLQEFLGVMNTEHIIES

SEQ ID NO: 1080 - protein, 183 aa, Homo sapiens
  IL6_WT
VPPGEDSKDVAAPHRQPLTSSERIDKQIRYILDGISALRKETCNKSNMCESSKEALAENNLNLPKMAEKDGCFQSGFNEETCLVKIITGLLEFEVYLEYLQNRFESSEEQARAVQMSTKVLIQFLQKKAKNLDAITTPDPTTNASLLTKLQAQNQWLQDMTTHLILRSFKEFLQSSLRALRQM

SEQ ID NO: 1081 - protein, 183 aa, Homo sapiens
  IL6_P64A
VPPGEDSKDVAAPHRQPLTSSERIDKQIRYILDGISALRKETCNKSNMCESSKEALAENNLNLAKMAEKDGCFQSGFNEETCLVKIITGLLEFEVYLEYLQNRFESSEEQARAVQMSTKVLIQFLQKKAKNLDAITTPDPTTNASLLTKLQAQNQWLQDMTTHLILRSFKEFLQSSLRALRQM

SEQ ID NO: 1082 - protein, 183 aa, Homo sapiens
  IL6_P64S
VPPGEDSKDVAAPHRQPLTSSERIDKQIRYILDGISALRKETCNKSNMCESSKEALAENNLNLSKMAEKDGCFQSGFNEETCLVKIITGLLEFEVYLEYLQNRFESSEEQARAVQMSTKVLIQFLQKKAKNLDAITTPDPTTNASLLTKLQAQNQWLQDMTTHLILRSFKEFLQSSLRALRQM

SEQ ID NO: 1083 - protein, 183 aa, Homo sapiens
  IL6_K65N
VPPGEDSKDVAAPHRQPLTSSERIDKQIRYILDGISALRKETCNKSNMCESSKEALAENNLNLPNMAEKDGCFQSGFNEETCLVKIITGLLEFEVYLEYLQNRFESSEEQARAVQMSTKVLIQFLQKKAKNLDAITTPDPTTNASLLTKLQAQNQWLQDMTTHLILRSFKEFLQSSLRALRQM

SEQ ID NO: 1084 - protein, 183 aa, Homo sapiens
  IL6_K65Q
VPPGEDSKDVAAPHRQPLTSSERIDKQIRYILDGISALRKETCNKSNMCESSKEALAENNLNLPQMAEKDGCFQSGFNEETCLVKIITGLLEFEVYLEYLQNRFESSEEQARAVQMSTKVLIQFLQKKAKNLDAITTPDPTTNASLLTKLQAQNQWLQDMTTHLILRSFKEFLQSSLRALRQM

SEQ ID NO: 1085 - protein, 183 aa, Homo sapiens
  IL6_M66I
VPPGEDSKDVAAPHRQPLTSSERIDKQIRYILDGISALRKETCNKSNMCESSKEALAENNLNLPKIAEKDGCFQSGFNEETCLVKIITGLLEFEVYLEYLQNRFESSEEQARAVQMSTKVLIQFLQKKAKNLDAITTPDPTTNASLLTKLQAQNQWLQDMTTHLILRSFKEFLQSSLRALRQM

SEQ ID NO: 1086 - protein, 183 aa, Homo sapiens
  IL6_M66V
VPPGEDSKDVAAPHRQPLTSSERIDKQIRYILDGISALRKETCNKSNMCESSKEALAENNLNLPKVAEKDGCFQSGFNEETCLVKIITGLLEFEVYLEYLQNRFESSEEQARAVQMSTKVLIQFLQKKAKNLDAITTPDPTTNASLLTKLQAQNQWLQDMTTHLILRSFKEFLQSSLRALRQM

SEQ ID NO: 1087 - protein, 183 aa, Homo sapiens
  IL6_E68N
VPPGEDSKDVAAPHRQPLTSSERIDKQIRYILDGISALRKETCNKSNMCESSKEALAENNLNLPKMANKDGCFQSGFNEETCLVKIITGLLEFEVYLEYLQNRFESSEEQARAVQMSTKVLIQFLQKKAKNLDAITTPDPTTNASLLTKLQAQNQWLQDMTTHLILRSFKEFLQSSLRALRQM

SEQ ID NO: 1088 - protein, 183 aa, Homo sapiens
  IL6_E68Q
VPPGEDSKDVAAPHRQPLTSSERIDKQIRYILDGISALRKETCNKSNMCESSKEALAENNLNLPKMAQKDGCFQSGFNEETCLVKIITGLLEFEVYLEYLQNRFESSEEQARAVQMSTKVLIQFLQKKAKNLDAITTPDPTTNASLLTKLQAQNQWLQDMTTHLILRSFKEFLQSSLRALRQM

SEQ ID NO: 1089 - protein, 183 aa, Homo sapiens
  IL6_E68H
VPPGEDSKDVAAPHRQPLTSSERIDKQIRYILDGISALRKETCNKSNMCESSKEALAENNLNLPKMAHKDGCFQSGFNEETCLVKIITGLLEFEVYLEYLQNRFESSEEQARAVQMSTKVLIQFLQKKAKNLDAITTPDPTTNASLLTKLQAQNQWLQDMTTHLILRSFKEFLQSSLRALRQM

SEQ ID NO: 1090 - protein, 183 aa, Homo sapiens
  IL6_K69N
VPPGEDSKDVAAPHRQPLTSSERIDKQIRYILDGISALRKETCNKSNMCESSKEALAENNLNLPKMAENDGCFQSGFNEETCLVKIITGLLEFEVYLEYLQNRFESSEEQARAVQMSTKVLIQFLQKKAKNLDAITTPDPTTNASLLTKLQAQNQWLQDMTTHLILRSFKEFLQSSLRALRQM

SEQ ID NO: 1091 - protein, 183 aa, Homo sapiens
  IL6_K69Q
VPPGEDSKDVAAPHRQPLTSSERIDKQIRYILDGISALRKETCNKSNMCESSKEALAENNLNLPKMAEQDGCFQSGFNEETCLVKIITGLLEFEVYLEYLQNRFESSEEQARAVQMSTKVLIQFLQKKAKNLDAITTPDPTTNASLLTKLQAQNQWLQDMTTHLILRSFKEFLQSSLRALRQM

SEQ ID NO: 1092 - protein, 183 aa, Homo sapiens
  IL6_F73I
VPPGEDSKDVAAPHRQPLTSSERIDKQIRYILDGISALRKETCNKSNMCESSKEALAENNLNLPKMAEKDGCIQSGFNEETCLVKIITGLLEFEVYLEYLQNRFESSEEQARAVQMSTKVLIQFLQKKAKNLDAITTPDPTTNASLLTKLQAQNQWLQDMTTHLILRSFKEFLQSSLRALRQM

SEQ ID NO: 1093 - protein, 183 aa, Homo sapiens
  IL6_F73V
VPPGEDSKDVAAPHRQPLTSSERIDKQIRYILDGISALRKETCNKSNMCESSKEALAENNLNLPKMAEKDGCVQSGFNEETCLVKIITGLLEFEVYLEYLQNRFESSEEQARAVQMSTKVLIQFLQKKAKNLDAITTPDPTTNASLLTKLQAQNQWLQDMTTHLILRSFKEFLQSSLRALRQM

SEQ ID NO: 1094 - protein, 183 aa, Homo sapiens
  IL6_F77I
VPPGEDSKDVAAPHRQPLTSSERIDKQIRYILDGISALRKETCNKSNMCESSKEALAENNLNLPKMAEKDGCFQSGINEETCLVKIITGLLEFEVYLEYLQNRFESSEEQARAVQMSTKVLIQFLQKKAKNLDAITTPDPTTNASLLTKLQAQNQWLQDMTTHLILRSFKEFLQSSLRALRQM

SEQ ID NO: 1095 - protein, 183 aa, Homo sapiens
  IL6_F77V
VPPGEDSKDVAAPHRQPLTSSERIDKQIRYILDGISALRKETCNKSNMCESSKEALAENNLNLPKMAEKDGCFQSGVNEETCLVKIITGLLEFEVYLEYLQNRFESSEEQARAVQMSTKVLIQFLQKKAKNLDAITTPDPTTNASLLTKLQAQNQWLQDMTTHLILRSFKEFLQSSLRALRQM

SEQ ID NO: 1096 - protein, 183 aa, Homo sapiens
  IL6_E92N
VPPGEDSKDVAAPHRQPLTSSERIDKQIRYILDGISALRKETCNKSNMCESSKEALAENNLNLPKMAEKDGCFQSGFNEETCLVKIITGLLNFEVYLEYLQNRFESSEEQARAVQMSTKVLIQFLQKKAKNLDAITTPDPTTNASLLTKLQAQNQWLQDMTTHLILRSFKEFLQSSLRALRQM

SEQ ID NO: 1097 - protein, 183 aa, Homo sapiens
  IL6_E92Q
VPPGEDSKDVAAPHRQPLTSSERIDKQIRYILDGISALRKETCNKSNMCESSKEALAENNLNLPKMAEKDGCFQSGFNEETCLVKIITGLLQFEVYLEYLQNRFESSEEQARAVQMSTKVLIQFLQKKAKNLDAITTPDPTTNASLLTKLQAQNQWLQDMTTHLILRSFKEFLQSSLRALRQM

SEQ ID NO: 1098 - protein, 183 aa, Homo sapiens
  IL6_E92H
VPPGEDSKDVAAPHRQPLTSSERIDKQIRYILDGISALRKETCNKSNMCESSKEALAENNLNLPKMAEKDGCFQSGFNEETCLVKIITGLLHFEVYLEYLQNRFESSEEQARAVQMSTKVLIQFLQKKAKNLDAITTPDPTTNASLLTKLQAQNQWLQDMTTHLILRSFKEFLQSSLRALRQM

SEQ ID NO: 1099 - protein, 183 aa, Homo sapiens
  IL6_E98N
VPPGEDSKDVAAPHRQPLTSSERIDKQIRYILDGISALRKETCNKSNMCESSKEALAENNLNLPKMAEKDGCFQSGFNEETCLVKIITGLLEFEVYLNYLQNRFESSEEQARAVQMSTKVLIQFLQKKAKNLDAITTPDPTTNASLLTKLQAQNQWLQDMTTHLILRSFKEFLQSSLRALRQM

SEQ ID NO: 1100 - protein, 183 aa, Homo sapiens
  IL6_E98Q
VPPGEDSKDVAAPHRQPLTSSERIDKQIRYILDGISALRKETCNKSNMCESSKEALAENNLNLPKMAEKDGCFQSGFNEETCLVKIITGLLEFEVYLQYLQNRFESSEEQARAVQMSTKVLIQFLQKKAKNLDAITTPDPTTNASLLTKLQAQNQWLQDMTTHLILRSFKEFLQSSLRALRQM

SEQ ID NO: 1101 - protein, 183 aa, Homo sapiens
  IL6_E98H
VPPGEDSKDVAAPHRQPLTSSERIDKQIRYILDGISALRKETCNKSNMCESSKEALAENNLNLPKMAEKDGCFQSGFNEETCLVKIITGLLEFEVYLHYLQNRFESSEEQARAVQMSTKVLIQFLQKKAKNLDAITTPDPTTNASLLTKLQAQNQWLQDMTTHLILRSFKEFLQSSLRALRQM

SEQ ID NO: 1102 - protein, 183 aa, Homo sapiens
  IL6_R103H
VPPGEDSKDVAAPHRQPLTSSERIDKQIRYILDGISALRKETCNKSNMCESSKEALAENNLNLPKMAEKDGCFQSGFNEETCLVKIITGLLEFEVYLEYLQNHFESSEEQARAVQMSTKVLIQFLQKKAKNLDAITTPDPTTNASLLTKLQAQNQWLQDMTTHLILRSFKEFLQSSLRALRQM

SEQ ID NO: 1103 - protein, 183 aa, Homo sapiens
  IL6_R103Q
VPPGEDSKDVAAPHRQPLTSSERIDKQIRYILDGISALRKETCNKSNMCESSKEALAENNLNLPKMAEKDGCFQSGFNEETCLVKIITGLLEFEVYLEYLQNQFESSEEQARAVQMSTKVLIQFLQKKAKNLDAITTPDPTTNASLLTKLQAQNQWLQDMTTHLILRSFKEFLQSSLRALRQM

SEQ ID NO: 1104 - protein, 183 aa, Homo sapiens
  IL6_E105N
VPPGEDSKDVAAPHRQPLTSSERIDKQIRYILDGISALRKETCNKSNMCESSKEALAENNLNLPKMAEKDGCFQSGFNEETCLVKIITGLLEFEVYLEYLQNRFNSSEEQARAVQMSTKVLIQFLQKKAKNLDAITTPDPTTNASLLTKLQAQNQWLQDMTTHLILRSFKEFLQSSLRALRQM

SEQ ID NO: 1105 - protein, 183 aa, Homo sapiens
  IL6_E105Q
VPPGEDSKDVAAPHRQPLTSSERIDKQIRYILDGISALRKETCNKSNMCESSKEALAENNLNLPKMAEKDGCFQSGFNEETCLVKIITGLLEFEVYLEYLQNRFQSSEEQARAVQMSTKVLIQFLQKKAKNLDAITTPDPTTNASLLTKLQAQNQWLQDMTTHLILRSFKEFLQSSLRALRQM

SEQ ID NO: 1106 - protein, 183 aa, Homo sapiens
  IL6_E105H
VPPGEDSKDVAAPHRQPLTSSERIDKQIRYILDGISALRKETCNKSNMCESSKEALAENNLNLPKMAEKDGCFQSGFNEETCLVKIITGLLEFEVYLEYLQNRFHSSEEQARAVQMSTKVLIQFLQKKAKNLDAITTPDPTTNASLLTKLQAQNQWLQDMTTHLILRSFKEFLQSSLRALRQM

SEQ ID NO: 1107 - protein, 183 aa, Homo sapiens
  IL6_E108N
VPPGEDSKDVAAPHRQPLTSSERIDKQIRYILDGISALRKETCNKSNMCESSKEALAENNLNLPKMAEKDGCFQSGFNEETCLVKIITGLLEFEVYLEYLQNRFESSNEQARAVQMSTKVLIQFLQKKAKNLDAITTPDPTTNASLLTKLQAQNQWLQDMTTHLILRSFKEFLQSSLRALRQM

SEQ ID NO: 1108 - protein, 183 aa, Homo sapiens
  IL6_E108Q
VPPGEDSKDVAAPHRQPLTSSERIDKQIRYILDGISALRKETCNKSNMCESSKEALAENNLNLPKMAEKDGCFQSGFNEETCLVKIITGLLEFEVYLEYLQNRFESSQEQARAVQMSTKVLIQFLQKKAKNLDAITTPDPTTNASLLTKLQAQNQWLQDMTTHLILRSFKEFLQSSLRALRQM

SEQ ID NO: 1109 - protein, 183 aa, Homo sapiens
  IL6_E108H
VPPGEDSKDVAAPHRQPLTSSERIDKQIRYILDGISALRKETCNKSNMCESSKEALAENNLNLPKMAEKDGCFQSGFNEETCLVKIITGLLEFEVYLEYLQNRFESSHEQARAVQMSTKVLIQFLQKKAKNLDAITTPDPTTNASLLTKLQAQNQWLQDMTTHLILRSFKEFLQSSLRALRQM

SEQ ID NO: 1110 - protein, 183 aa, Homo sapiens
  IL6_D133N
VPPGEDSKDVAAPHRQPLTSSERIDKQIRYILDGISALRKETCNKSNMCESSKEALAENNLNLPKMAEKDGCFQSGFNEETCLVKIITGLLEFEVYLEYLQNRFESSEEQARAVQMSTKVLIQFLQKKAKNLNAITTPDPTTNASLLTKLQAQNQWLQDMTTHLILRSFKEFLQSSLRALRQM

SEQ ID NO: 1111 - protein, 183 aa, Homo sapiens
  IL6_D133Q
VPPGEDSKDVAAPHRQPLTSSERIDKQIRYILDGISALRKETCNKSNMCESSKEALAENNLNLPKMAEKDGCFQSGFNEETCLVKIITGLLEFEVYLEYLQNRFESSEEQARAVQMSTKVLIQFLQKKAKNLQAITTPDPTTNASLLTKLQAQNQWLQDMTTHLILRSFKEFLQSSLRALRQM

SEQ ID NO: 1112 - protein, 183 aa, Homo sapiens
  IL6_P138A
VPPGEDSKDVAAPHRQPLTSSERIDKQIRYILDGISALRKETCNKSNMCESSKEALAENNLNLPKMAEKDGCFQSGFNEETCLVKIITGLLEFEVYLEYLQNRFESSEEQARAVQMSTKVLIQFLQKKAKNLDAITTADPTTNASLLTKLQAQNQWLQDMTTHLILRSFKEFLQSSLRALRQM

SEQ ID NO: 1113 - protein, 183 aa, Homo sapiens
  IL6_P138S
VPPGEDSKDVAAPHRQPLTSSERIDKQIRYILDGISALRKETCNKSNMCESSKEALAENNLNLPKMAEKDGCFQSGFNEETCLVKIITGLLEFEVYLEYLQNRFESSEEQARAVQMSTKVLIQFLQKKAKNLDAITTSDPTTNASLLTKLQAQNQWLQDMTTHLILRSFKEFLQSSLRALRQM

SEQ ID NO: 1114 - protein, 183 aa, Homo sapiens
  IL6_D139N
VPPGEDSKDVAAPHRQPLTSSERIDKQIRYILDGISALRKETCNKSNMCESSKEALAENNLNLPKMAEKDGCFQSGFNEETCLVKIITGLLEFEVYLEYLQNRFESSEEQARAVQMSTKVLIQFLQKKAKNLDAITTPNPTTNASLLTKLQAQNQWLQDMTTHLILRSFKEFLQSSLRALRQM

SEQ ID NO: 1115 - protein, 183 aa, Homo sapiens
  IL6_D139Q
VPPGEDSKDVAAPHRQPLTSSERIDKQIRYILDGISALRKETCNKSNMCESSKEALAENNLNLPKMAEKDGCFQSGFNEETCLVKIITGLLEFEVYLEYLQNRFESSEEQARAVQMSTKVLIQFLQKKAKNLDAITTPQPTTNASLLTKLQAQNQWLQDMTTHLILRSFKEFLQSSLRALRQM

SEQ ID NO: 1116 - protein, 183 aa, Homo sapiens
  IL6_P140A
VPPGEDSKDVAAPHRQPLTSSERIDKQIRYILDGISALRKETCNKSNMCESSKEALAENNLNLPKMAEKDGCFQSGFNEETCLVKIITGLLEFEVYLEYLQNRFESSEEQARAVQMSTKVLIQFLQKKAKNLDAITTPDATTNASLLTKLQAQNQWLQDMTTHLILRSFKEFLQSSLRALRQM

SEQ ID NO: 1117 - protein, 183 aa, Homo sapiens
  IL6_P140S
VPPGEDSKDVAAPHRQPLTSSERIDKQIRYILDGISALRKETCNKSNMCESSKEALAENNLNLPKMAEKDGCFQSGFNEETCLVKIITGLLEFEVYLEYLQNRFESSEEQARAVQMSTKVLIQFLQKKAKNLDAITTPDSTTNASLLTKLQAQNQWLQDMTTHLILRSFKEFLQSSLRALRQM

SEQ ID NO: 1118 - protein, 183 aa, Homo sapiens
  IL6_K149N
VPPGEDSKDVAAPHRQPLTSSERIDKQIRYILDGISALRKETCNKSNMCESSKEALAENNLNLPKMAEKDGCFQSGFNEETCLVKIITGLLEFEVYLEYLQNRFESSEEQARAVQMSTKVLIQFLQKKAKNLDAITTPDPTTNASLLTNLQAQNQWLQDMTTHLILRSFKEFLQSSLRALRQM

SEQ ID NO: 1119 - protein, 183 aa, Homo sapiens
  IL6_K149Q
VPPGEDSKDVAAPHRQPLTSSERIDKQIRYILDGISALRKETCNKSNMCESSKEALAENNLNLPKMAEKDGCFQSGFNEETCLVKIITGLLEFEVYLEYLQNRFESSEEQARAVQMSTKVLIQFLQKKAKNLDAITTPDPTTNASLLTQLQAQNQWLQDMTTHLILRSFKEFLQSSLRALRQM

SEQ ID NO: 1120 - protein, 183 aa, Homo sapiens
  IL6_W156S
VPPGEDSKDVAAPHRQPLTSSERIDKQIRYILDGISALRKETCNKSNMCESSKEALAENNLNLPKMAEKDGCFQSGFNEETCLVKIITGLLEFEVYLEYLQNRFESSEEQARAVQMSTKVLIQFLQKKAKNLDAITTPDPTTNASLLTKLQAQNQSLQDMTTHLILRSFKEFLQSSLRALRQM

SEQ ID NO: 1121 - protein, 183 aa, Homo sapiens
  IL6_W156H
VPPGEDSKDVAAPHRQPLTSSERIDKQIRYILDGISALRKETCNKSNMCESSKEALAENNLNLPKMAEKDGCFQSGFNEETCLVKIITGLLEFEVYLEYLQNRFESSEEQARAVQMSTKVLIQFLQKKAKNLDAITTPDPTTNASLLTKLQAQNQHLQDMTTHLILRSFKEFLQSSLRALRQM

SEQ ID NO: 1122 - protein, 183 aa, Homo sapiens
  IL6_R178H
VPPGEDSKDVAAPHRQPLTSSERIDKQIRYILDGISALRKETCNKSNMCESSKEALAENNLNLPKMAEKDGCFQSGFNEETCLVKIITGLLEFEVYLEYLQNRFESSEEQARAVQMSTKVLIQFLQKKAKNLDAITTPDPTTNASLLTKLQAQNQWLQDMTTHLILRSFKEFLQSSLHALRQM

SEQ ID NO: 1123 - protein, 183 aa, Homo sapiens
  IL6_R178Q
VPPGEDSKDVAAPHRQPLTSSERIDKQIRYILDGISALRKETCNKSNMCESSKEALAENNLNLPKMAEKDGCFQSGFNEETCLVKIITGLLEFEVYLEYLQNRFESSEEQARAVQMSTKVLIQFLQKKAKNLDAITTPDPTTNASLLTKLQAQNQWLQDMTTHLILRSFKEFLQSSLQALRQM

SEQ ID NO: 1124 - protein, 183 aa, Homo sapiens
  IL6_R181H
VPPGEDSKDVAAPHRQPLTSSERIDKQIRYILDGISALRKETCNKSNMCESSKEALAENNLNLPKMAEKDGCFQSGFNEETCLVKIITGLLEFEVYLEYLQNRFESSEEQARAVQMSTKVLIQFLQKKAKNLDAITTPDPTTNASLLTKLQAQNQWLQDMTTHLILRSFKEFLQSSLRALHQM

SEQ ID NO: 1125 - protein, 183 aa, Homo sapiens
  IL6_R181Q
VPPGEDSKDVAAPHRQPLTSSERIDKQIRYILDGISALRKETCNKSNMCESSKEALAENNLNLPKMAEKDGCFQSGFNEETCLVKIITGLLEFEVYLEYLQNRFESSEEQARAVQMSTKVLIQFLQKKAKNLDAITTPDPTTNASLLTKLQAQNQWLQDMTTHLILRSFKEFLQSSLRALQQM

SEQ ID NO: 1126 - protein, 167 aa, Homo sapiens
  LEP_WT
MHWGTLCGFLWLWPYLFYVQAVPIQKVQDDTKTLIKTIVTRINDISHTQSVSSKQKVTGLDFIPGLHPILTLSKMDQTLAVYQQILTSMPSRNVIQISNDLENLRDLLHVLAFSKSCHLPWASGLETLDSLGGVLEASGYSTEVVALSRLQGSLQDMLWQLDLSPGC

SEQ ID NO: 1127 - protein, 167 aa, Homo sapiens
  LEP_P43A
MHWGTLCGFLWLWPYLFYVQAVPIQKVQDDTKTLIKTIVTRINDISHTQSVSSKQKVTGLDFIAGLHPILTLSKMDQTLAVYQQILTSMPSRNVIQISNDLENLRDLLHVLAFSKSCHLPWASGLETLDSLGGVLEASGYSTEVVALSRLQGSLQDMLWQLDLSPGC

SEQ ID NO: 1128 - protein, 167 aa, Homo sapiens
  LEP_P43S
MHWGTLCGFLWLWPYLFYVQAVPIQKVQDDTKTLIKTIVTRINDISHTQSVSSKQKVTGLDFISGLHPILTLSKMDQTLAVYQQILTSMPSRNVIQISNDLENLRDLLHVLAFSKSCHLPWASGLETLDSLGGVLEASGYSTEVVALSRLQGSLQDMLWQLDLSPGC

SEQ ID NO: 1129 - protein, 167 aa, Homo sapiens
  LEP_L49I
MHWGTLCGFLWLWPYLFYVQAVPIQKVQDDTKTLIKTIVTRINDISHTQSVSSKQKVTGLDFIPGLHPIITLSKMDQTLAVYQQILTSMPSRNVIQISNDLENLRDLLHVLAFSKSCHLPWASGLETLDSLGGVLEASGYSTEVVALSRLQGSLQDMLWQLDLSPGC

SEQ ID NO: 1130 - protein, 167 aa, Homo sapiens
  LEP_L49V
MHWGTLCGFLWLWPYLFYVQAVPIQKVQDDTKTLIKTIVTRINDISHTQSVSSKQKVTGLDFIPGLHPIVTLSKMDQTLAVYQQILTSMPSRNVIQISNDLENLRDLLHVLAFSKSCHLPWASGLETLDSLGGVLEASGYSTEVVALSRLQGSLQDMLWQLDLSPGC

SEQ ID NO: 1131 - protein, 167 aa, Homo sapiens
  LEP_P99A
MHWGTLCGFLWLWPYLFYVQAVPIQKVQDDTKTLIKTIVTRINDISHTQSVSSKQKVTGLDFIPGLHPILTLSKMDQTLAVYQQILTSMPSRNVIQISNDLENLRDLLHVLAFSKSCHLAWASGLETLDSLGGVLEASGYSTEVVALSRLQGSLQDMLWQLDLSPGC

SEQ ID NO: 1132 - protein, 167 aa, Homo sapiens
  LEP_P99S
MHWGTLCGFLWLWPYLFYVQAVPIQKVQDDTKTLIKTIVTRINDISHTQSVSSKQKVTGLDFIPGLHPILTLSKMDQTLAVYQQILTSMPSRNVIQISNDLENLRDLLHVLAFSKSCHLSWASGLETLDSLGGVLEASGYSTEVVALSRLQGSLQDMLWQLDLSPGC

SEQ ID NO: 1133 - protein, 167 aa, Homo sapiens
  LEP_W100S
MHWGTLCGFLWLWPYLFYVQAVPIQKVQDDTKTLIKTIVTRINDISHTQSVSSKQKVTGLDFIPGLHPILTLSKMDQTLAVYQQILTSMPSRNVIQISNDLENLRDLLHVLAFSKSCHLPSASGLETLDSLGGVLEASGYSTEVVALSRLQGSLQDMLWQLDLSPGC

SEQ ID NO: 1134 - protein, 167 aa, Homo sapiens
  LEP_W100H
MHWGTLCGFLWLWPYLFYVQAVPIQKVQDDTKTLIKTIVTRINDISHTQSVSSKQKVTGLDFIPGLHPILTLSKMDQTLAVYQQILTSMPSRNVIQISNDLENLRDLLHVLAFSKSCHLPHASGLETLDSLGGVLEASGYSTEVVALSRLQGSLQDMLWQLDLSPGC

SEQ ID NO: 1135 - protein, 167 aa, Homo sapiens
  LEP_L104I
MHWGTLCGFLWLWPYLFYVQAVPIQKVQDDTKTLIKTIVTRINDISHTQSVSSKQKVTGLDFIPGLHPILTLSKMDQTLAVYQQILTSMPSRNVIQISNDLENLRDLLHVLAFSKSCHLPWASGIETLDSLGGVLEASGYSTEVVALSRLQGSLQDMLWQLDLSPGC

SEQ ID NO: 1136 - protein, 167 aa, Homo sapiens
  LEP_L104V
MHWGTLCGFLWLWPYLFYVQAVPIQKVQDDTKTLIKTIVTRINDISHTQSVSSKQKVTGLDFIPGLHPILTLSKMDQTLAVYQQILTSMPSRNVIQISNDLENLRDLLHVLAFSKSCHLPWASGVETLDSLGGVLEASGYSTEVVALSRLQGSLQDMLWQLDLSPGC

SEQ ID NO: 1137 - protein, 167 aa, Homo sapiens
  LEP_E105N
MHWGTLCGFLWLWPYLFYVQAVPIQKVQDDTKTLIKTIVTRINDISHTQSVSSKQKVTGLDFIPGLHPILTLSKMDQTLAVYQQILTSMPSRNVIQISNDLENLRDLLHVLAFSKSCHLPWASGLNTLDSLGGVLEASGYSTEVVALSRLQGSLQDMLWQLDLSPGC

SEQ ID NO: 1138 - protein, 167 aa, Homo sapiens
  LEP_E105Q
MHWGTLCGFLWLWPYLFYVQAVPIQKVQDDTKTLIKTIVTRINDISHTQSVSSKQKVTGLDFIPGLHPILTLSKMDQTLAVYQQILTSMPSRNVIQISNDLENLRDLLHVLAFSKSCHLPWASGLQTLDSLGGVLEASGYSTEVVALSRLQGSLQDMLWQLDLSPGC

SEQ ID NO: 1139 - protein, 167 aa, Homo sapiens
  LEP_E105H
MHWGTLCGFLWLWPYLFYVQAVPIQKVQDDTKTLIKTIVTRINDISHTQSVSSKQKVTGLDFIPGLHPILTLSKMDQTLAVYQQILTSMPSRNVIQISNDLENLRDLLHVLAFSKSCHLPWASGLHTLDSLGGVLEASGYSTEVVALSRLQGSLQDMLWQLDLSPGC

SEQ ID NO: 1140 - protein, 167 aa, Homo sapiens
  LEP_L107I
MHWGTLCGFLWLWPYLFYVQAVPIQKVQDDTKTLIKTIVTRINDISHTQSVSSKQKVTGLDFIPGLHPILTLSKMDQTLAVYQQILTSMPSRNVIQISNDLENLRDLLHVLAFSKSCHLPWASGLETIDSLGGVLEASGYSTEVVALSRLQGSLQDMLWQLDLSPGC

SEQ ID NO: 1141 - protein, 167 aa, Homo sapiens
  LEP_L107V
MHWGTLCGFLWLWPYLFYVQAVPIQKVQDDTKTLIKTIVTRINDISHTQSVSSKQKVTGLDFIPGLHPILTLSKMDQTLAVYQQILTSMPSRNVIQISNDLENLRDLLHVLAFSKSCHLPWASGLETVDSLGGVLEASGYSTEVVALSRLQGSLQDMLWQLDLSPGC

SEQ ID NO: 1142 - protein, 167 aa, Homo sapiens
  LEP_D108N
MHWGTLCGFLWLWPYLFYVQAVPIQKVQDDTKTLIKTIVTRINDISHTQSVSSKQKVTGLDFIPGLHPILTLSKMDQTLAVYQQILTSMPSRNVIQISNDLENLRDLLHVLAFSKSCHLPWASGLETLNSLGGVLEASGYSTEVVALSRLQGSLQDMLWQLDLSPGC

SEQ ID NO: 1143 - protein, 167 aa, Homo sapiens
  LEP_D108Q
MHWGTLCGFLWLWPYLFYVQAVPIQKVQDDTKTLIKTIVTRINDISHTQSVSSKQKVTGLDFIPGLHPILTLSKMDQTLAVYQQILTSMPSRNVIQISNDLENLRDLLHVLAFSKSCHLPWASGLETLQSLGGVLEASGYSTEVVALSRLQGSLQDMLWQLDLSPGC

SEQ ID NO: 1144 - protein, 167 aa, Homo sapiens
  LEP_D141N
MHWGTLCGFLWLWPYLFYVQAVPIQKVQDDTKTLIKTIVTRINDISHTQSVSSKQKVTGLDFIPGLHPILTLSKMDQTLAVYQQILTSMPSRNVIQISNDLENLRDLLHVLAFSKSCHLPWASGLETLDSLGGVLEASGYSTEVVALSRLQGSLQDMLWQLNLSPGC

SEQ ID NO: 1145 - protein, 167 aa, Homo sapiens
  LEP_D141Q
MHWGTLCGFLWLWPYLFYVQAVPIQKVQDDTKTLIKTIVTRINDISHTQSVSSKQKVTGLDFIPGLHPILTLSKMDQTLAVYQQILTSMPSRNVIQISNDLENLRDLLHVLAFSKSCHLPWASGLETLDSLGGVLEASGYSTEVVALSRLQGSLQDMLWQLQLSPGC

SEQ ID NO: 1146 - protein, 167 aa, Homo sapiens
  LEP_L142I
MHWGTLCGFLWLWPYLFYVQAVPIQKVQDDTKTLIKTIVTRINDISHTQSVSSKQKVTGLDFIPGLHPILTLSKMDQTLAVYQQILTSMPSRNVIQISNDLENLRDLLHVLAFSKSCHLPWASGLETLDSLGGVLEASGYSTEVVALSRLQGSLQDMLWQLDISPGC

SEQ ID NO: 1147 - protein, 167 aa, Homo sapiens
  LEP_L142V
MHWGTLCGFLWLWPYLFYVQAVPIQKVQDDTKTLIKTIVTRINDISHTQSVSSKQKVTGLDFIPGLHPILTLSKMDQTLAVYQQILTSMPSRNVIQISNDLENLRDLLHVLAFSKSCHLPWASGLETLDSLGGVLEASGYSTEVVALSRLQGSLQDMLWQLDVSPGC

SEQ ID NO: 1148 - protein, 180 aa, Homo sapiens
  LIF_WT
SPLPITPVNATCAIRHPCHNNLMNQIRSQLAQLNGSANALFILYYTAQGEPFPNNLDKLCGPNVTDFPPFHANGTEKAKLVELYRIVVYLGTSLGNITRDQKILNPSALSLHSKLNATADILRGLLSNVLCRLCSKYHVGHVDVTYGPDTSGKDVFQKKKLGCQLLGKYKQIIAVLAQAF

SEQ ID NO: 1149 - protein, 180 aa, Homo sapiens
  LIF_P69A
SPLPITPVNATCAIRHPCHNNLMNQIRSQLAQLNGSANALFILYYTAQGEPFPNNLDKLCGPNVTDFPAFHANGTEKAKLVELYRIVVYLGTSLGNITRDQKILNPSALSLHSKLNATADILRGLLSNVLCRLCSKYHVGHVDVTYGPDTSGKDVFQKKKLGCQLLGKYKQIIAVLAQAF

SEQ ID NO: 1150 - protein, 180 aa, Homo sapiens
  LIF_P69S
SPLPITPVNATCAIRHPCHNNLMNQIRSQLAQLNGSANALFILYYTAQGEPFPNNLDKLCGPNVTDFPSFHANGTEKAKLVELYRIVVYLGTSLGNITRDQKILNPSALSLHSKLNATADILRGLLSNVLCRLCSKYHVGHVDVTYGPDTSGKDVFQKKKLGCQLLGKYKQIIAVLAQAF

SEQ ID NO: 1151 - protein, 180 aa, Homo sapiens
  LIF_F70I
SPLPITPVNATCAIRHPCHNNLMNQIRSQLAQLNGSANALFILYYTAQGEPFPNNLDKLCGPNVTDFPPIHANGTEKAKLVELYRIVVYLGTSLGNITRDQKILNPSALSLHSKLNATADILRGLLSNVLCRLCSKYHVGHVDVTYGPDTSGKDVFQKKKLGCQLLGKYKQIIAVLAQAF

SEQ ID NO: 1152 - protein, 180 aa, Homo sapiens
  LIF_F70V
SPLPITPVNATCAIRHPCHNNLMNQIRSQLAQLNGSANALFILYYTAQGEPFPNNLDKLCGPNVTDFPPVHANGTEKAKLVELYRIVVYLGTSLGNITRDQKILNPSALSLHSKLNATADILRGLLSNVLCRLCSKYHVGHVDVTYGPDTSGKDVFQKKKLGCQLLGKYKQIIAVLAQAF

SEQ ID NO: 1153 - protein, 180 aa, Homo sapiens
  LIF_R85H
SPLPITPVNATCAIRHPCHNNLMNQIRSQLAQLNGSANALFILYYTAQGEPFPNNLDKLCGPNVTDFPPFHANGTEKAKLVELYHIVVYLGTSLGNITRDQKILNPSALSLHSKLNATADILRGLLSNVLCRLCSKYHVGHVDVTYGPDTSGKDVFQKKKLGCQLLGKYKQIIAVLAQAF

SEQ ID NO: 1154 - protein, 180 aa, Homo sapiens
  LIF_R85Q
SPLPITPVNATCAIRHPCHNNLMNQIRSQLAQLNGSANALFILYYTAQGEPFPNNLDKLCGPNVTDFPPFHANGTEKAKLVELYQIVVYLGTSLGNITRDQKILNPSALSLHSKLNATADILRGLLSNVLCRLCSKYHVGHVDVTYGPDTSGKDVFQKKKLGCQLLGKYKQIIAVLAQAF

SEQ ID NO: 1155 - protein, 180 aa, Homo sapiens
  LIF_R99H
SPLPITPVNATCAIRHPCHNNLMNQIRSQLAQLNGSANALFILYYTAQGEPFPNNLDKLCGPNVTDFPPFHANGTEKAKLVELYRIVVYLGTSLGNITHDQKILNPSALSLHSKLNATADILRGLLSNVLCRLCSKYHVGHVDVTYGPDTSGKDVFQKKKLGCQLLGKYKQIIAVLAQAF

SEQ ID NO: 1156 - protein, 180 aa, Homo sapiens
  LIF_R99Q
SPLPITPVNATCAIRHPCHNNLMNQIRSQLAQLNGSANALFILYYTAQGEPFPNNLDKLCGPNVTDFPPFHANGTEKAKLVELYRIVVYLGTSLGNITQDQKILNPSALSLHSKLNATADILRGLLSNVLCRLCSKYHVGHVDVTYGPDTSGKDVFQKKKLGCQLLGKYKQIIAVLAQAF

SEQ ID NO: 1157 - protein, 180 aa, Homo sapiens
  LIF_K102N
SPLPITPVNATCAIRHPCHNNLMNQIRSQLAQLNGSANALFILYYTAQGEPFPNNLDKLCGPNVTDFPPFHANGTEKAKLVELYRIVVYLGTSLGNITRDQNILNPSALSLHSKLNATADILRGLLSNVLCRLCSKYHVGHVDVTYGPDTSGKDVFQKKKLGCQLLGKYKQIIAVLAQAF

SEQ ID NO: 1158 - protein, 180 aa, Homo sapiens
  LIF_K102Q
SPLPITPVNATCAIRHPCHNNLMNQIRSQLAQLNGSANALFILYYTAQGEPFPNNLDKLCGPNVTDFPPFHANGTEKAKLVELYRIVVYLGTSLGNITRDQQILNPSALSLHSKLNATADILRGLLSNVLCRLCSKYHVGHVDVTYGPDTSGKDVFQKKKLGCQLLGKYKQIIAVLAQAF

SEQ ID NO: 1159 - protein, 180 aa, Homo sapiens
  LIF_L104I
SPLPITPVNATCAIRHPCHNNLMNQIRSQLAQLNGSANALFILYYTAQGEPFPNNLDKLCGPNVTDFPPFHANGTEKAKLVELYRIVVYLGTSLGNITRDQKIINPSALSLHSKLNATADILRGLLSNVLCRLCSKYHVGHVDVTYGPDTSGKDVFQKKKLGCQLLGKYKQIIAVLAQAF

SEQ ID NO: 1160 - protein, 180 aa, Homo sapiens
  LIF_L104V
SPLPITPVNATCAIRHPCHNNLMNQIRSQLAQLNGSANALFILYYTAQGEPFPNNLDKLCGPNVTDFPPFHANGTEKAKLVELYRIVVYLGTSLGNITRDQKIVNPSALSLHSKLNATADILRGLLSNVLCRLCSKYHVGHVDVTYGPDTSGKDVFQKKKLGCQLLGKYKQIIAVLAQAF

SEQ ID NO: 1161 - protein, 180 aa, Homo sapiens
  LIF_P106A
SPLPITPVNATCAIRHPCHNNLMNQIRSQLAQLNGSANALFILYYTAQGEPFPNNLDKLCGPNVTDFPPFHANGTEKAKLVELYRIVVYLGTSLGNITRDQKILNASALSLHSKLNATADILRGLLSNVLCRLCSKYHVGHVDVTYGPDTSGKDVFQKKKLGCQLLGKYKQIIAVLAQAF

SEQ ID NO: 1162 - protein, 180 aa, Homo sapiens
  LIF_P106S
SPLPITPVNATCAIRHPCHNNLMNQIRSQLAQLNGSANALFILYYTAQGEPFPNNLDKLCGPNVTDFPPFHANGTEKAKLVELYRIVVYLGTSLGNITRDQKILNSSALSLHSKLNATADILRGLLSNVLCRLCSKYHVGHVDVTYGPDTSGKDVFQKKKLGCQLLGKYKQIIAVLAQAF

SEQ ID NO: 1163 - protein, 180 aa, Homo sapiens
  LIF_L109I
SPLPITPVNATCAIRHPCHNNLMNQIRSQLAQLNGSANALFILYYTAQGEPFPNNLDKLCGPNVTDFPPFHANGTEKAKLVELYRIVVYLGTSLGNITRDQKILNPSAISLHSKLNATADILRGLLSNVLCRLCSKYHVGHVDVTYGPDTSGKDVFQKKKLGCQLLGKYKQIIAVLAQAF

SEQ ID NO: 1164 - protein, 180 aa, Homo sapiens
  LIF_L109V
SPLPITPVNATCAIRHPCHNNLMNQIRSQLAQLNGSANALFILYYTAQGEPFPNNLDKLCGPNVTDFPPFHANGTEKAKLVELYRIVVYLGTSLGNITRDQKILNPSAVSLHSKLNATADILRGLLSNVLCRLCSKYHVGHVDVTYGPDTSGKDVFQKKKLGCQLLGKYKQIIAVLAQAF

SEQ ID NO: 1165 - protein, 180 aa, Homo sapiens
  LIF_Y137H
SPLPITPVNATCAIRHPCHNNLMNQIRSQLAQLNGSANALFILYYTAQGEPFPNNLDKLCGPNVTDFPPFHANGTEKAKLVELYRIVVYLGTSLGNITRDQKILNPSALSLHSKLNATADILRGLLSNVLCRLCSKHHVGHVDVTYGPDTSGKDVFQKKKLGCQLLGKYKQIIAVLAQAF

SEQ ID NO: 1166 - protein, 180 aa, Homo sapiens
  LIF_Y137I
SPLPITPVNATCAIRHPCHNNLMNQIRSQLAQLNGSANALFILYYTAQGEPFPNNLDKLCGPNVTDFPPFHANGTEKAKLVELYRIVVYLGTSLGNITRDQKILNPSALSLHSKLNATADILRGLLSNVLCRLCSKIHVGHVDVTYGPDTSGKDVFQKKKLGCQLLGKYKQIIAVLAQAF

SEQ ID NO: 1167 - protein, 180 aa, Homo sapiens
  LIF_D143N
SPLPITPVNATCAIRHPCHNNLMNQIRSQLAQLNGSANALFILYYTAQGEPFPNNLDKLCGPNVTDFPPFHANGTEKAKLVELYRIVVYLGTSLGNITRDQKILNPSALSLHSKLNATADILRGLLSNVLCRLCSKYHVGHVNVTYGPDTSGKDVFQKKKLGCQLLGKYKQIIAVLAQAF

SEQ ID NO: 1168 - protein, 180 aa, Homo sapiens
  LIF_D143Q
SPLPITPVNATCAIRHPCHNNLMNQIRSQLAQLNGSANALFILYYTAQGEPFPNNLDKLCGPNVTDFPPFHANGTEKAKLVELYRIVVYLGTSLGNITRDQKILNPSALSLHSKLNATADILRGLLSNVLCRLCSKYHVGHVQVTYGPDTSGKDVFQKKKLGCQLLGKYKQIIAVLAQAF

SEQ ID NO: 1169 - protein, 180 aa, Homo sapiens
  LIF_Y146H
SPLPITPVNATCAIRHPCHNNLMNQIRSQLAQLNGSANALFILYYTAQGEPFPNNLDKLCGPNVTDFPPFHANGTEKAKLVELYRIVVYLGTSLGNITRDQKILNPSALSLHSKLNATADILRGLLSNVLCRLCSKYHVGHVDVTHGPDTSGKDVFQKKKLGCQLLGKYKQIIAVLAQAF

SEQ ID NO: 1170 - protein, 180 aa, Homo sapiens
  LIF_Y146I
SPLPITPVNATCAIRHPCHNNLMNQIRSQLAQLNGSANALFILYYTAQGEPFPNNLDKLCGPNVTDFPPFHANGTEKAKLVELYRIVVYLGTSLGNITRDQKILNPSALSLHSKLNATADILRGLLSNVLCRLCSKYHVGHVDVTIGPDTSGKDVFQKKKLGCQLLGKYKQIIAVLAQAF

SEQ ID NO: 1171 - protein, 180 aa, Homo sapiens
  LIF_P148A
SPLPITPVNATCAIRHPCHNNLMNQIRSQLAQLNGSANALFILYYTAQGEPFPNNLDKLCGPNVTDFPPFHANGTEKAKLVELYRIVVYLGTSLGNITRDQKILNPSALSLHSKLNATADILRGLLSNVLCRLCSKYHVGHVDVTYGADTSGKDVFQKKKLGCQLLGKYKQIIAVLAQAF

SEQ ID NO: 1172 - protein, 180 aa, Homo sapiens
  LIF_P148S
SPLPITPVNATCAIRHPCHNNLMNQIRSQLAQLNGSANALFILYYTAQGEPFPNNLDKLCGPNVTDFPPFHANGTEKAKLVELYRIVVYLGTSLGNITRDQKILNPSALSLHSKLNATADILRGLLSNVLCRLCSKYHVGHVDVTYGSDTSGKDVFQKKKLGCQLLGKYKQIIAVLAQAF

SEQ ID NO: 1173 - protein, 180 aa, Homo sapiens
  LIF_D149N
SPLPITPVNATCAIRHPCHNNLMNQIRSQLAQLNGSANALFILYYTAQGEPFPNNLDKLCGPNVTDFPPFHANGTEKAKLVELYRIVVYLGTSLGNITRDQKILNPSALSLHSKLNATADILRGLLSNVLCRLCSKYHVGHVDVTYGPNTSGKDVFQKKKLGCQLLGKYKQIIAVLAQAF

SEQ ID NO: 1174 - protein, 180 aa, Homo sapiens
  LIF_D149Q
SPLPITPVNATCAIRHPCHNNLMNQIRSQLAQLNGSANALFILYYTAQGEPFPNNLDKLCGPNVTDFPPFHANGTEKAKLVELYRIVVYLGTSLGNITRDQKILNPSALSLHSKLNATADILRGLLSNVLCRLCSKYHVGHVDVTYGPQTSGKDVFQKKKLGCQLLGKYKQIIAVLAQAF

SEQ ID NO: 1175 - protein, 180 aa, Homo sapiens
  LIF_K153N
SPLPITPVNATCAIRHPCHNNLMNQIRSQLAQLNGSANALFILYYTAQGEPFPNNLDKLCGPNVTDFPPFHANGTEKAKLVELYRIVVYLGTSLGNITRDQKILNPSALSLHSKLNATADILRGLLSNVLCRLCSKYHVGHVDVTYGPDTSGNDVFQKKKLGCQLLGKYKQIIAVLAQAF

SEQ ID NO: 1176 - protein, 180 aa, Homo sapiens
  LIF_K153Q
SPLPITPVNATCAIRHPCHNNLMNQIRSQLAQLNGSANALFILYYTAQGEPFPNNLDKLCGPNVTDFPPFHANGTEKAKLVELYRIVVYLGTSLGNITRDQKILNPSALSLHSKLNATADILRGLLSNVLCRLCSKYHVGHVDVTYGPDTSGQDVFQKKKLGCQLLGKYKQIIAVLAQAF

SEQ ID NO: 1177 - protein, 180 aa, Homo sapiens
  LIF_D154N
SPLPITPVNATCAIRHPCHNNLMNQIRSQLAQLNGSANALFILYYTAQGEPFPNNLDKLCGPNVTDFPPFHANGTEKAKLVELYRIVVYLGTSLGNITRDQKILNPSALSLHSKLNATADILRGLLSNVLCRLCSKYHVGHVDVTYGPDTSGKNVFQKKKLGCQLLGKYKQIIAVLAQAF

SEQ ID NO: 1178 - protein, 180 aa, Homo sapiens
  LIF_D154Q
SPLPITPVNATCAIRHPCHNNLMNQIRSQLAQLNGSANALFILYYTAQGEPFPNNLDKLCGPNVTDFPPFHANGTEKAKLVELYRIVVYLGTSLGNITRDQKILNPSALSLHSKLNATADILRGLLSNVLCRLCSKYHVGHVDVTYGPDTSGKQVFQKKKLGCQLLGKYKQIIAVLAQAF

SEQ ID NO: 1179 - protein, 180 aa, Homo sapiens
  LIF_F156I
SPLPITPVNATCAIRHPCHNNLMNQIRSQLAQLNGSANALFILYYTAQGEPFPNNLDKLCGPNVTDFPPFHANGTEKAKLVELYRIVVYLGTSLGNITRDQKILNPSALSLHSKLNATADILRGLLSNVLCRLCSKYHVGHVDVTYGPDTSGKDVIQKKKLGCQLLGKYKQIIAVLAQAF

SEQ ID NO: 1180 - protein, 180 aa, Homo sapiens
  LIF_F156V
SPLPITPVNATCAIRHPCHNNLMNQIRSQLAQLNGSANALFILYYTAQGEPFPNNLDKLCGPNVTDFPPFHANGTEKAKLVELYRIVVYLGTSLGNITRDQKILNPSALSLHSKLNATADILRGLLSNVLCRLCSKYHVGHVDVTYGPDTSGKDVVQKKKLGCQLLGKYKQIIAVLAQAF

SEQ ID NO: 1181 - protein, 227 aa, Homo sapiens
  ONCM_WT
AAIGSCSKEYRVLLGQLQKQTDLMQDTSRLLDPYIRIQGLDVPKLREHCRERPGAFPSEETLRGLGRRGFLQTLNATLGCVLHRLADLEQRLPKAQDLERSGLNIEDLEKLQMARPNILGLRNNIYCMAQLLDNSDTAEPTKAGRGASQPPTPTPASDAFQRKLEGCRFLHGYHRFMHSVGRVFSKWGESPNRSRRHSPHQALRKGVRRTRPSRKGKRLMTRGQLPR

SEQ ID NO: 1182 - protein, 227 aa, Homo sapiens
  ONCM_E59N
AAIGSCSKEYRVLLGQLQKQTDLMQDTSRLLDPYIRIQGLDVPKLREHCRERPGAFPSNETLRGLGRRGFLQTLNATLGCVLHRLADLEQRLPKAQDLERSGLNIEDLEKLQMARPNILGLRNNIYCMAQLLDNSDTAEPTKAGRGASQPPTPTPASDAFQRKLEGCRFLHGYHRFMHSVGRVFSKWGESPNRSRRHSPHQALRKGVRRTRPSRKGKRLMTRGQLPR

SEQ ID NO: 1183 - protein, 227 aa, Homo sapiens
  ONCM_E59Q
AAIGSCSKEYRVLLGQLQKQTDLMQDTSRLLDPYIRIQGLDVPKLREHCRERPGAFPSQETLRGLGRRGFLQTLNATLGCVLHRLADLEQRLPKAQDLERSGLNIEDLEKLQMARPNILGLRNNIYCMAQLLDNSDTAEPTKAGRGASQPPTPTPASDAFQRKLEGCRFLHGYHRFMHSVGRVFSKWGESPNRSRRHSPHQALRKGVRRTRPSRKGKRLMTRGQLPR

SEQ ID NO: 1184 - protein, 227 aa, Homo sapiens
  ONCM_E59H
AAIGSCSKEYRVLLGQLQKQTDLMQDTSRLLDPYIRIQGLDVPKLREHCRERPGAFPSHETLRGLGRRGFLQTLNATLGCVLHRLADLEQRLPKAQDLERSGLNIEDLEKLQMARPNILGLRNNIYCMAQLLDNSDTAEPTKAGRGASQPPTPTPASDAFQRKLEGCRFLHGYHRFMHSVGRVFSKWGESPNRSRRHSPHQALRKGVRRTRPSRKGKRLMTRGQLPR

SEQ ID NO: 1185 - protein, 227 aa, Homo sapiens
  ONCM_E60N
AAIGSCSKEYRVLLGQLQKQTDLMQDTSRLLDPYIRIQGLDVPKLREHCRERPGAFPSENTLRGLGRRGFLQTLNATLGCVLHRLADLEQRLPKAQDLERSGLNIEDLEKLQMARPNILGLRNNIYCMAQLLDNSDTAEPTKAGRGASQPPTPTPASDAFQRKLEGCRFLHGYHRFMHSVGRVFSKWGESPNRSRRHSPHQALRKGVRRTRPSRKGKRLMTRGQLPR

SEQ ID NO: 1186 - protein, 227 aa, Homo sapiens
  ONCM_E60Q
AAIGSCSKEYRVLLGQLQKQTDLMQDTSRLLDPYIRIQGLDVPKLREHCRERPGAFPSEQTLRGLGRRGFLQTLNATLGCVLHRLADLEQRLPKAQDLERSGLNIEDLEKLQMARPNILGLRNNIYCMAQLLDNSDTAEPTKAGRGASQPPTPTPASDAFQRKLEGCRFLHGYHRFMHSVGRVFSKWGESPNRSRRHSPHQALRKGVRRTRPSRKGKRLMTRGQLPR

SEQ ID NO: 1187 - protein, 227 aa, Homo sapiens
  ONCM_E60H
AAIGSCSKEYRVLLGQLQKQTDLMQDTSRLLDPYIRIQGLDVPKLREHCRERPGAFPSEHTLRGLGRRGFLQTLNATLGCVLHRLADLEQRLPKAQDLERSGLNIEDLEKLQMARPNILGLRNNIYCMAQLLDNSDTAEPTKAGRGASQPPTPTPASDAFQRKLEGCRFLHGYHRFMHSVGRVFSKWGESPNRSRRHSPHQALRKGVRRTRPSRKGKRLMTRGQLPR

SEQ ID NO: 1188 - protein, 227 aa, Homo sapiens
  ONCM_R63H
AAIGSCSKEYRVLLGQLQKQTDLMQDTSRLLDPYIRIQGLDVPKLREHCRERPGAFPSEETLHGLGRRGFLQTLNATLGCVLHRLADLEQRLPKAQDLERSGLNIEDLEKLQMARPNILGLRNNIYCMAQLLDNSDTAEPTKAGRGASQPPTPTPASDAFQRKLEGCRFLHGYHRFMHSVGRVFSKWGESPNRSRRHSPHQALRKGVRRTRPSRKGKRLMTRGQLPR

SEQ ID NO: 1189 - protein, 227 aa, Homo sapiens
  ONCM_R63Q
AAIGSCSKEYRVLLGQLQKQTDLMQDTSRLLDPYIRIQGLDVPKLREHCRERPGAFPSEETLQGLGRRGFLQTLNATLGCVLHRLADLEQRLPKAQDLERSGLNIEDLEKLQMARPNILGLRNNIYCMAQLLDNSDTAEPTKAGRGASQPPTPTPASDAFQRKLEGCRFLHGYHRFMHSVGRVFSKWGESPNRSRRHSPHQALRKGVRRTRPSRKGKRLMTRGQLPR

SEQ ID NO: 1190 - protein, 227 aa, Homo sapiens
  ONCM_L65I
AAIGSCSKEYRVLLGQLQKQTDLMQDTSRLLDPYIRIQGLDVPKLREHCRERPGAFPSEETLRGIGRRGFLQTLNATLGCVLHRLADLEQRLPKAQDLERSGLNIEDLEKLQMARPNILGLRNNIYCMAQLLDNSDTAEPTKAGRGASQPPTPTPASDAFQRKLEGCRFLHGYHRFMHSVGRVFSKWGESPNRSRRHSPHQALRKGVRRTRPSRKGKRLMTRGQLPR

SEQ ID NO: 1191 - protein, 227 aa, Homo sapiens
  ONCM_L65V
AAIGSCSKEYRVLLGQLQKQTDLMQDTSRLLDPYIRIQGLDVPKLREHCRERPGAFPSEETLRGVGRRGFLQTLNATLGCVLHRLADLEQRLPKAQDLERSGLNIEDLEKLQMARPNILGLRNNIYCMAQLLDNSDTAEPTKAGRGASQPPTPTPASDAFQRKLEGCRFLHGYHRFMHSVGRVFSKWGESPNRSRRHSPHQALRKGVRRTRPSRKGKRLMTRGQLPR

SEQ ID NO: 1192 - protein, 227 aa, Homo sapiens
  ONCM_R84H
AAIGSCSKEYRVLLGQLQKQTDLMQDTSRLLDPYIRIQGLDVPKLREHCRERPGAFPSEETLRGLGRRGFLQTLNATLGCVLHHLADLEQRLPKAQDLERSGLNIEDLEKLQMARPNILGLRNNIYCMAQLLDNSDTAEPTKAGRGASQPPTPTPASDAFQRKLEGCRFLHGYHRFMHSVGRVFSKWGESPNRSRRHSPHQALRKGVRRTRPSRKGKRLMTRGQLPR

SEQ ID NO: 1193 - protein, 227 aa, Homo sapiens
  ONCM_R84Q
AAIGSCSKEYRVLLGQLQKQTDLMQDTSRLLDPYIRIQGLDVPKLREHCRERPGAFPSEETLRGLGRRGFLQTLNATLGCVLHQLADLEQRLPKAQDLERSGLNIEDLEKLQMARPNILGLRNNIYCMAQLLDNSDTAEPTKAGRGASQPPTPTPASDAFQRKLEGCRFLHGYHRFMHSVGRVFSKWGESPNRSRRHSPHQALRKGVRRTRPSRKGKRLMTRGQLPR

SEQ ID NO: 1194 - protein, 227 aa, Homo sapiens
  ONCM_D87N
AAIGSCSKEYRVLLGQLQKQTDLMQDTSRLLDPYIRIQGLDVPKLREHCRERPGAFPSEETLRGLGRRGFLQTLNATLGCVLHRLANLEQRLPKAQDLERSGLNIEDLEKLQMARPNILGLRNNIYCMAQLLDNSDTAEPTKAGRGASQPPTPTPASDAFQRKLEGCRFLHGYHRFMHSVGRVFSKWGESPNRSRRHSPHQALRKGVRRTRPSRKGKRLMTRGQLPR

SEQ ID NO: 1195 - protein, 227 aa, Homo sapiens
  ONCM_D87Q
AAIGSCSKEYRVLLGQLQKQTDLMQDTSRLLDPYIRIQGLDVPKLREHCRERPGAFPSEETLRGLGRRGFLQTLNATLGCVLHRLAQLEQRLPKAQDLERSGLNIEDLEKLQMARPNILGLRNNIYCMAQLLDNSDTAEPTKAGRGASQPPTPTPASDAFQRKLEGCRFLHGYHRFMHSVGRVFSKWGESPNRSRRHSPHQALRKGVRRTRPSRKGKRLMTRGQLPR

SEQ ID NO: 1196 - protein, 227 aa, Homo sapiens
  ONCM_E89N
AAIGSCSKEYRVLLGQLQKQTDLMQDTSRLLDPYIRIQGLDVPKLREHCRERPGAFPSEETLRGLGRRGFLQTLNATLGCVLHRLADLNQRLPKAQDLERSGLNIEDLEKLQMARPNILGLRNNIYCMAQLLDNSDTAEPTKAGRGASQPPTPTPASDAFQRKLEGCRFLHGYHRFMHSVGRVFSKWGESPNRSRRHSPHQALRKGVRRTRPSRKGKRLMTRGQLPR

SEQ ID NO: 1197 - protein, 227 aa, Homo sapiens
  ONCM_E89Q
AAIGSCSKEYRVLLGQLQKQTDLMQDTSRLLDPYIRIQGLDVPKLREHCRERPGAFPSEETLRGLGRRGFLQTLNATLGCVLHRLADLQQRLPKAQDLERSGLNIEDLEKLQMARPNILGLRNNIYCMAQLLDNSDTAEPTKAGRGASQPPTPTPASDAFQRKLEGCRFLHGYHRFMHSVGRVFSKWGESPNRSRRHSPHQALRKGVRRTRPSRKGKRLMTRGQLPR

SEQ ID NO: 1198 - protein, 227 aa, Homo sapiens
  ONCM_E89H
AAIGSCSKEYRVLLGQLQKQTDLMQDTSRLLDPYIRIQGLDVPKLREHCRERPGAFPSEETLRGLGRRGFLQTLNATLGCVLHRLADLHQRLPKAQDLERSGLNIEDLEKLQMARPNILGLRNNIYCMAQLLDNSDTAEPTKAGRGASQPPTPTPASDAFQRKLEGCRFLHGYHRFMHSVGRVFSKWGESPNRSRRHSPHQALRKGVRRTRPSRKGKRLMTRGQLPR

SEQ ID NO: 1199 - protein, 227 aa, Homo sapiens
  ONCM_R91H
AAIGSCSKEYRVLLGQLQKQTDLMQDTSRLLDPYIRIQGLDVPKLREHCRERPGAFPSEETLRGLGRRGFLQTLNATLGCVLHRLADLEQHLPKAQDLERSGLNIEDLEKLQMARPNILGLRNNIYCMAQLLDNSDTAEPTKAGRGASQPPTPTPASDAFQRKLEGCRFLHGYHRFMHSVGRVFSKWGESPNRSRRHSPHQALRKGVRRTRPSRKGKRLMTRGQLPR

SEQ ID NO: 1200 - protein, 227 aa, Homo sapiens
  ONCM_R91Q
AAIGSCSKEYRVLLGQLQKQTDLMQDTSRLLDPYIRIQGLDVPKLREHCRERPGAFPSEETLRGLGRRGFLQTLNATLGCVLHRLADLEQQLPKAQDLERSGLNIEDLEKLQMARPNILGLRNNIYCMAQLLDNSDTAEPTKAGRGASQPPTPTPASDAFQRKLEGCRFLHGYHRFMHSVGRVFSKWGESPNRSRRHSPHQALRKGVRRTRPSRKGKRLMTRGQLPR

SEQ ID NO: 1201 - protein, 227 aa, Homo sapiens
  ONCM_K94N
AAIGSCSKEYRVLLGQLQKQTDLMQDTSRLLDPYIRIQGLDVPKLREHCRERPGAFPSEETLRGLGRRGFLQTLNATLGCVLHRLADLEQRLPNAQDLERSGLNIEDLEKLQMARPNILGLRNNIYCMAQLLDNSDTAEPTKAGRGASQPPTPTPASDAFQRKLEGCRFLHGYHRFMHSVGRVFSKWGESPNRSRRHSPHQALRKGVRRTRPSRKGKRLMTRGQLPR

SEQ ID NO: 1202 - protein, 227 aa, Homo sapiens
  ONCM_K94Q
AAIGSCSKEYRVLLGQLQKQTDLMQDTSRLLDPYIRIQGLDVPKLREHCRERPGAFPSEETLRGLGRRGFLQTLNATLGCVLHRLADLEQRLPQAQDLERSGLNIEDLEKLQMARPNILGLRNNIYCMAQLLDNSDTAEPTKAGRGASQPPTPTPASDAFQRKLEGCRFLHGYHRFMHSVGRVFSKWGESPNRSRRHSPHQALRKGVRRTRPSRKGKRLMTRGQLPR

SEQ ID NO: 1203 - protein, 227 aa, Homo sapiens
  ONCM_D97N
AAIGSCSKEYRVLLGQLQKQTDLMQDTSRLLDPYIRIQGLDVPKLREHCRERPGAFPSEETLRGLGRRGFLQTLNATLGCVLHRLADLEQRLPKAQNLERSGLNIEDLEKLQMARPNILGLRNNIYCMAQLLDNSDTAEPTKAGRGASQPPTPTPASDAFQRKLEGCRFLHGYHRFMHSVGRVFSKWGESPNRSRRHSPHQALRKGVRRTRPSRKGKRLMTRGQLPR

SEQ ID NO: 1204 - protein, 227 aa, Homo sapiens
  ONCM_D97Q
AAIGSCSKEYRVLLGQLQKQTDLMQDTSRLLDPYIRIQGLDVPKLREHCRERPGAFPSEETLRGLGRRGFLQTLNATLGCVLHRLADLEQRLPKAQQLERSGLNIEDLEKLQMARPNILGLRNNIYCMAQLLDNSDTAEPTKAGRGASQPPTPTPASDAFQRKLEGCRFLHGYHRFMHSVGRVFSKWGESPNRSRRHSPHQALRKGVRRTRPSRKGKRLMTRGQLPR

SEQ ID NO: 1205 - protein, 227 aa, Homo sapiens
  ONCM_E99N
AAIGSCSKEYRVLLGQLQKQTDLMQDTSRLLDPYIRIQGLDVPKLREHCRERPGAFPSEETLRGLGRRGFLQTLNATLGCVLHRLADLEQRLPKAQDLNRSGLNIEDLEKLQMARPNILGLRNNIYCMAQLLDNSDTAEPTKAGRGASQPPTPTPASDAFQRKLEGCRFLHGYHRFMHSVGRVFSKWGESPNRSRRHSPHQALRKGVRRTRPSRKGKRLMTRGQLPR

SEQ ID NO: 1206 - protein, 227 aa, Homo sapiens
  ONCM_E99Q
AAIGSCSKEYRVLLGQLQKQTDLMQDTSRLLDPYIRIQGLDVPKLREHCRERPGAFPSEETLRGLGRRGFLQTLNATLGCVLHRLADLEQRLPKAQDLQRSGLNIEDLEKLQMARPNILGLRNNIYCMAQLLDNSDTAEPTKAGRGASQPPTPTPASDAFQRKLEGCRFLHGYHRFMHSVGRVFSKWGESPNRSRRHSPHQALRKGVRRTRPSRKGKRLMTRGQLPR

SEQ ID NO: 1207 - protein, 227 aa, Homo sapiens
  ONCM_E99H
AAIGSCSKEYRVLLGQLQKQTDLMQDTSRLLDPYIRIQGLDVPKLREHCRERPGAFPSEETLRGLGRRGFLQTLNATLGCVLHRLADLEQRLPKAQDLHRSGLNIEDLEKLQMARPNILGLRNNIYCMAQLLDNSDTAEPTKAGRGASQPPTPTPASDAFQRKLEGCRFLHGYHRFMHSVGRVFSKWGESPNRSRRHSPHQALRKGVRRTRPSRKGKRLMTRGQLPR

SEQ ID NO: 1208 - protein, 227 aa, Homo sapiens
  ONCM_R100H
AAIGSCSKEYRVLLGQLQKQTDLMQDTSRLLDPYIRIQGLDVPKLREHCRERPGAFPSEETLRGLGRRGFLQTLNATLGCVLHRLADLEQRLPKAQDLEHSGLNIEDLEKLQMARPNILGLRNNIYCMAQLLDNSDTAEPTKAGRGASQPPTPTPASDAFQRKLEGCRFLHGYHRFMHSVGRVFSKWGESPNRSRRHSPHQALRKGVRRTRPSRKGKRLMTRGQLPR

SEQ ID NO: 1209 - protein, 227 aa, Homo sapiens
  ONCM_R100Q
AAIGSCSKEYRVLLGQLQKQTDLMQDTSRLLDPYIRIQGLDVPKLREHCRERPGAFPSEETLRGLGRRGFLQTLNATLGCVLHRLADLEQRLPKAQDLEQSGLNIEDLEKLQMARPNILGLRNNIYCMAQLLDNSDTAEPTKAGRGASQPPTPTPASDAFQRKLEGCRFLHGYHRFMHSVGRVFSKWGESPNRSRRHSPHQALRKGVRRTRPSRKGKRLMTRGQLPR

SEQ ID NO: 1210 - protein, 227 aa, Homo sapiens
  ONCM_L103I
AAIGSCSKEYRVLLGQLQKQTDLMQDTSRLLDPYIRIQGLDVPKLREHCRERPGAFPSEETLRGLGRRGFLQTLNATLGCVLHRLADLEQRLPKAQDLERSGINIEDLEKLQMARPNILGLRNNIYCMAQLLDNSDTAEPTKAGRGASQPPTPTPASDAFQRKLEGCRFLHGYHRFMHSVGRVFSKWGESPNRSRRHSPHQALRKGVRRTRPSRKGKRLMTRGQLPR

SEQ ID NO: 1211 - protein, 227 aa, Homo sapiens
  ONCM_L103V
AAIGSCSKEYRVLLGQLQKQTDLMQDTSRLLDPYIRIQGLDVPKLREHCRERPGAFPSEETLRGLGRRGFLQTLNATLGCVLHRLADLEQRLPKAQDLERSGVNIEDLEKLQMARPNILGLRNNIYCMAQLLDNSDTAEPTKAGRGASQPPTPTPASDAFQRKLEGCRFLHGYHRFMHSVGRVFSKWGESPNRSRRHSPHQALRKGVRRTRPSRKGKRLMTRGQLPR

SEQ ID NO: 1212 - protein, 227 aa, Homo sapiens
  ONCM_E106N
AAIGSCSKEYRVLLGQLQKQTDLMQDTSRLLDPYIRIQGLDVPKLREHCRERPGAFPSEETLRGLGRRGFLQTLNATLGCVLHRLADLEQRLPKAQDLERSGLNINDLEKLQMARPNILGLRNNIYCMAQLLDNSDTAEPTKAGRGASQPPTPTPASDAFQRKLEGCRFLHGYHRFMHSVGRVFSKWGESPNRSRRHSPHQALRKGVRRTRPSRKGKRLMTRGQLPR

SEQ ID NO: 1213 - protein, 227 aa, Homo sapiens
  ONCM_E106Q
AAIGSCSKEYRVLLGQLQKQTDLMQDTSRLLDPYIRIQGLDVPKLREHCRERPGAFPSEETLRGLGRRGFLQTLNATLGCVLHRLADLEQRLPKAQDLERSGLNIQDLEKLQMARPNILGLRNNIYCMAQLLDNSDTAEPTKAGRGASQPPTPTPASDAFQRKLEGCRFLHGYHRFMHSVGRVFSKWGESPNRSRRHSPHQALRKGVRRTRPSRKGKRLMTRGQLPR

SEQ ID NO: 1214 - protein, 227 aa, Homo sapiens
  ONCM_E106H
AAIGSCSKEYRVLLGQLQKQTDLMQDTSRLLDPYIRIQGLDVPKLREHCRERPGAFPSEETLRGLGRRGFLQTLNATLGCVLHRLADLEQRLPKAQDLERSGLNIHDLEKLQMARPNILGLRNNIYCMAQLLDNSDTAEPTKAGRGASQPPTPTPASDAFQRKLEGCRFLHGYHRFMHSVGRVFSKWGESPNRSRRHSPHQALRKGVRRTRPSRKGKRLMTRGQLPR

SEQ ID NO: 1215 - protein, 248 aa, Homo sapiens
  SCF_WT
EGICRNRVTNNVKDVTKLVANLPKDYMITLKYVPGMDVLPSHCWISEMVVQLSDSLTDLLDKFSNISEGLSNYSIIDKLVNIVDDLVECVKENSSKDLKKSFKSPEPRLFTPEEFFRIFNRSIDAFKDFVVASETSDCVVSSTLSPEKDSRVSVTKPFMLPPVAASSLRNDSSSSNRKAKNPPGDSSLHWAAMALPALFSLIIGFAFGALYWKKRQPSLTRAVENIQINEEDNEISMLQEKEREFQEV

SEQ ID NO: 1216 - protein, 248 aa, Homo sapiens
  SCF_M27I
EGICRNRVTNNVKDVTKLVANLPKDYIITLKYVPGMDVLPSHCWISEMVVQLSDSLTDLLDKFSNISEGLSNYSIIDKLVNIVDDLVECVKENSSKDLKKSFKSPEPRLFTPEEFFRIFNRSIDAFKDFVVASETSDCVVSSTLSPEKDSRVSVTKPFMLPPVAASSLRNDSSSSNRKAKNPPGDSSLHWAAMALPALFSLIIGFAFGALYWKKRQPSLTRAVENIQINEEDNEISMLQEKEREFQEV

SEQ ID NO: 1217 - protein, 248 aa, Homo sapiens
  SCF_M27V
EGICRNRVTNNVKDVTKLVANLPKDYVITLKYVPGMDVLPSHCWISEMVVQLSDSLTDLLDKFSNISEGLSNYSIIDKLVNIVDDLVECVKENSSKDLKKSFKSPEPRLFTPEEFFRIFNRSIDAFKDFVVASETSDCVVSSTLSPEKDSRVSVTKPFMLPPVAASSLRNDSSSSNRKAKNPPGDSSLHWAAMALPALFSLIIGFAFGALYWKKRQPSLTRAVENIQINEEDNEISMLQEKEREFQEV

SEQ ID NO: 1218 - protein, 248 aa, Homo sapiens
  SCF_K31N
EGICRNRVTNNVKDVTKLVANLPKDYMITLNYVPGMDVLPSHCWISEMVVQLSDSLTDLLDKFSNISEGLSNYSIIDKLVNIVDDLVECVKENSSKDLKKSFKSPEPRLFTPEEFFRIFNRSIDAFKDFVVASETSDCVVSSTLSPEKDSRVSVTKPFMLPPVAASSLRNDSSSSNRKAKNPPGDSSLHWAAMALPALFSLIIGFAFGALYWKKRQPSLTRAVENIQINEEDNEISMLQEKEREFQEV

SEQ ID NO: 1219 - protein, 248 aa, Homo sapiens
  SCF_K31Q
EGICRNRVTNNVKDVTKLVANLPKDYMITLQYVPGMDVLPSHCWISEMVVQLSDSLTDLLDKFSNISEGLSNYSIIDKLVNIVDDLVECVKENSSKDLKKSFKSPEPRLFTPEEFFRIFNRSIDAFKDFVVASETSDCVVSSTLSPEKDSRVSVTKPFMLPPVAASSLRNDSSSSNRKAKNPPGDSSLHWAAMALPALFSLIIGFAFGALYWKKRQPSLTRAVENIQINEEDNEISMLQEKEREFQEV

SEQ ID NO: 1220 - protein, 248 aa, Homo sapiens
  SCF_P34A
EGICRNRVTNNVKDVTKLVANLPKDYMITLKYVAGMDVLPSHCWISEMVVQLSDSLTDLLDKFSNISEGLSNYSIIDKLVNIVDDLVECVKENSSKDLKKSFKSPEPRLFTPEEFFRIFNRSIDAFKDFVVASETSDCVVSSTLSPEKDSRVSVTKPFMLPPVAASSLRNDSSSSNRKAKNPPGDSSLHWAAMALPALFSLIIGFAFGALYWKKRQPSLTRAVENIQINEEDNEISMLQEKEREFQEV

SEQ ID NO: 1221 - protein, 248 aa, Homo sapiens
  SCF_P34S
EGICRNRVTNNVKDVTKLVANLPKDYMITLKYVSGMDVLPSHCWISEMVVQLSDSLTDLLDKFSNISEGLSNYSIIDKLVNIVDDLVECVKENSSKDLKKSFKSPEPRLFTPEEFFRIFNRSIDAFKDFVVASETSDCVVSSTLSPEKDSRVSVTKPFMLPPVAASSLRNDSSSSNRKAKNPPGDSSLHWAAMALPALFSLIIGFAFGALYWKKRQPSLTRAVENIQINEEDNEISMLQEKEREFQEV

SEQ ID NO: 1222 - protein, 248 aa, Homo sapiens
  SCF_D37N
EGICRNRVTNNVKDVTKLVANLPKDYMITLKYVPGMNVLPSHCWISEMVVQLSDSLTDLLDKFSNISEGLSNYSIIDKLVNIVDDLVECVKENSSKDLKKSFKSPEPRLFTPEEFFRIFNRSIDAFKDFVVASETSDCVVSSTLSPEKDSRVSVTKPFMLPPVAASSLRNDSSSSNRKAKNPPGDSSLHWAAMALPALFSLIIGFAFGALYWKKRQPSLTRAVENIQINEEDNEISMLQEKEREFQEV

SEQ ID NO: 1223 - protein, 248 aa, Homo sapiens
  SCF_D37Q
EGICRNRVTNNVKDVTKLVANLPKDYMITLKYVPGMQVLPSHCWISEMVVQLSDSLTDLLDKFSNISEGLSNYSIIDKLVNIVDDLVECVKENSSKDLKKSFKSPEPRLFTPEEFFRIFNRSIDAFKDFVVASETSDCVVSSTLSPEKDSRVSVTKPFMLPPVAASSLRNDSSSSNRKAKNPPGDSSLHWAAMALPALFSLIIGFAFGALYWKKRQPSLTRAVENIQINEEDNEISMLQEKEREFQEV

SEQ ID NO: 1224 - protein, 248 aa, Homo sapiens
  SCF_D54N
EGICRNRVTNNVKDVTKLVANLPKDYMITLKYVPGMDVLPSHCWISEMVVQLSNSLTDLLDKFSNISEGLSNYSIIDKLVNIVDDLVECVKENSSKDLKKSFKSPEPRLFTPEEFFRIFNRSIDAFKDFVVASETSDCVVSSTLSPEKDSRVSVTKPFMLPPVAASSLRNDSSSSNRKAKNPPGDSSLHWAAMALPALFSLIIGFAFGALYWKKRQPSLTRAVENIQINEEDNEISMLQEKEREFQEV

SEQ ID NO: 1225 - protein, 248 aa, Homo sapiens
  SCF_D54Q
EGICRNRVTNNVKDVTKLVANLPKDYMITLKYVPGMDVLPSHCWISEMVVQLSQSLTDLLDKFSNISEGLSNYSIIDKLVNIVDDLVECVKENSSKDLKKSFKSPEPRLFTPEEFFRIFNRSIDAFKDFVVASETSDCVVSSTLSPEKDSRVSVTKPFMLPPVAASSLRNDSSSSNRKAKNPPGDSSLHWAAMALPALFSLIIGFAFGALYWKKRQPSLTRAVENIQINEEDNEISMLQEKEREFQEV

SEQ ID NO: 1226 - protein, 248 aa, Homo sapiens
  SCF_D58N
EGICRNRVTNNVKDVTKLVANLPKDYMITLKYVPGMDVLPSHCWISEMVVQLSDSLTNLLDKFSNISEGLSNYSIIDKLVNIVDDLVECVKENSSKDLKKSFKSPEPRLFTPEEFFRIFNRSIDAFKDFVVASETSDCVVSSTLSPEKDSRVSVTKPFMLPPVAASSLRNDSSSSNRKAKNPPGDSSLHWAAMALPALFSLIIGFAFGALYWKKRQPSLTRAVENIQINEEDNEISMLQEKEREFQEV

SEQ ID NO: 1227 - protein, 248 aa, Homo sapiens
  SCF_D58Q
EGICRNRVTNNVKDVTKLVANLPKDYMITLKYVPGMDVLPSHCWISEMVVQLSDSLTQLLDKFSNISEGLSNYSIIDKLVNIVDDLVECVKENSSKDLKKSFKSPEPRLFTPEEFFRIFNRSIDAFKDFVVASETSDCVVSSTLSPEKDSRVSVTKPFMLPPVAASSLRNDSSSSNRKAKNPPGDSSLHWAAMALPALFSLIIGFAFGALYWKKRQPSLTRAVENIQINEEDNEISMLQEKEREFQEV

SEQ ID NO: 1228 - protein, 248 aa, Homo sapiens
  SCF_D61N
EGICRNRVTNNVKDVTKLVANLPKDYMITLKYVPGMDVLPSHCWISEMVVQLSDSLTDLLNKFSNISEGLSNYSIIDKLVNIVDDLVECVKENSSKDLKKSFKSPEPRLFTPEEFFRIFNRSIDAFKDFVVASETSDCVVSSTLSPEKDSRVSVTKPFMLPPVAASSLRNDSSSSNRKAKNPPGDSSLHWAAMALPALFSLIIGFAFGALYWKKRQPSLTRAVENIQINEEDNEISMLQEKEREFQEV

SEQ ID NO: 1229 - protein, 248 aa, Homo sapiens
  SCF_D61Q
EGICRNRVTNNVKDVTKLVANLPKDYMITLKYVPGMDVLPSHCWISEMVVQLSDSLTDLLQKFSNISEGLSNYSIIDKLVNIVDDLVECVKENSSKDLKKSFKSPEPRLFTPEEFFRIFNRSIDAFKDFVVASETSDCVVSSTLSPEKDSRVSVTKPFMLPPVAASSLRNDSSSSNRKAKNPPGDSSLHWAAMALPALFSLIIGFAFGALYWKKRQPSLTRAVENIQINEEDNEISMLQEKEREFQEV

SEQ ID NO: 1230 - protein, 248 aa, Homo sapiens
  SCF_K62N
EGICRNRVTNNVKDVTKLVANLPKDYMITLKYVPGMDVLPSHCWISEMVVQLSDSLTDLLDNFSNISEGLSNYSIIDKLVNIVDDLVECVKENSSKDLKKSFKSPEPRLFTPEEFFRIFNRSIDAFKDFVVASETSDCVVSSTLSPEKDSRVSVTKPFMLPPVAASSLRNDSSSSNRKAKNPPGDSSLHWAAMALPALFSLIIGFAFGALYWKKRQPSLTRAVENIQINEEDNEISMLQEKEREFQEV

SEQ ID NO: 1231 - protein, 248 aa, Homo sapiens
  SCF_K62Q
EGICRNRVTNNVKDVTKLVANLPKDYMITLKYVPGMDVLPSHCWISEMVVQLSDSLTDLLDQFSNISEGLSNYSIIDKLVNIVDDLVECVKENSSKDLKKSFKSPEPRLFTPEEFFRIFNRSIDAFKDFVVASETSDCVVSSTLSPEKDSRVSVTKPFMLPPVAASSLRNDSSSSNRKAKNPPGDSSLHWAAMALPALFSLIIGFAFGALYWKKRQPSLTRAVENIQINEEDNEISMLQEKEREFQEV

SEQ ID NO: 1232 - protein, 248 aa, Homo sapiens
  SCF_F63I
EGICRNRVTNNVKDVTKLVANLPKDYMITLKYVPGMDVLPSHCWISEMVVQLSDSLTDLLDKISNISEGLSNYSIIDKLVNIVDDLVECVKENSSKDLKKSFKSPEPRLFTPEEFFRIFNRSIDAFKDFVVASETSDCVVSSTLSPEKDSRVSVTKPFMLPPVAASSLRNDSSSSNRKAKNPPGDSSLHWAAMALPALFSLIIGFAFGALYWKKRQPSLTRAVENIQINEEDNEISMLQEKEREFQEV

SEQ ID NO: 1233 - protein, 248 aa, Homo sapiens
  SCF_F63V
EGICRNRVTNNVKDVTKLVANLPKDYMITLKYVPGMDVLPSHCWISEMVVQLSDSLTDLLDKVSNISEGLSNYSIIDKLVNIVDDLVECVKENSSKDLKKSFKSPEPRLFTPEEFFRIFNRSIDAFKDFVVASETSDCVVSSTLSPEKDSRVSVTKPFMLPPVAASSLRNDSSSSNRKAKNPPGDSSLHWAAMALPALFSLIIGFAFGALYWKKRQPSLTRAVENIQINEEDNEISMLQEKEREFQEV

SEQ ID NO: 1234 - protein, 248 aa, Homo sapiens
  SCF_K96N
EGICRNRVTNNVKDVTKLVANLPKDYMITLKYVPGMDVLPSHCWISEMVVQLSDSLTDLLDKFSNISEGLSNYSIIDKLVNIVDDLVECVKENSSNDLKKSFKSPEPRLFTPEEFFRIFNRSIDAFKDFVVASETSDCVVSSTLSPEKDSRVSVTKPFMLPPVAASSLRNDSSSSNRKAKNPPGDSSLHWAAMALPALFSLIIGFAFGALYWKKRQPSLTRAVENIQINEEDNEISMLQEKEREFQEV

SEQ ID NO: 1235 - protein, 248 aa, Homo sapiens
  SCF_K96Q
EGICRNRVTNNVKDVTKLVANLPKDYMITLKYVPGMDVLPSHCWISEMVVQLSDSLTDLLDKFSNISEGLSNYSIIDKLVNIVDDLVECVKENSSQDLKKSFKSPEPRLFTPEEFFRIFNRSIDAFKDFVVASETSDCVVSSTLSPEKDSRVSVTKPFMLPPVAASSLRNDSSSSNRKAKNPPGDSSLHWAAMALPALFSLIIGFAFGALYWKKRQPSLTRAVENIQINEEDNEISMLQEKEREFQEV

SEQ ID NO: 1236 - protein, 248 aa, Homo sapiens
  SCF_L98I
EGICRNRVTNNVKDVTKLVANLPKDYMITLKYVPGMDVLPSHCWISEMVVQLSDSLTDLLDKFSNISEGLSNYSIIDKLVNIVDDLVECVKENSSKDIKKSFKSPEPRLFTPEEFFRIFNRSIDAFKDFVVASETSDCVVSSTLSPEKDSRVSVTKPFMLPPVAASSLRNDSSSSNRKAKNPPGDSSLHWAAMALPALFSLIIGFAFGALYWKKRQPSLTRAVENIQINEEDNEISMLQEKEREFQEV

SEQ ID NO: 1237 - protein, 248 aa, Homo sapiens
  SCF_L98V
EGICRNRVTNNVKDVTKLVANLPKDYMITLKYVPGMDVLPSHCWISEMVVQLSDSLTDLLDKFSNISEGLSNYSIIDKLVNIVDDLVECVKENSSKDVKKSFKSPEPRLFTPEEFFRIFNRSIDAFKDFVVASETSDCVVSSTLSPEKDSRVSVTKPFMLPPVAASSLRNDSSSSNRKAKNPPGDSSLHWAAMALPALFSLIIGFAFGALYWKKRQPSLTRAVENIQINEEDNEISMLQEKEREFQEV

SEQ ID NO: 1238 - protein, 248 aa, Homo sapiens
  SCF_K99N
EGICRNRVTNNVKDVTKLVANLPKDYMITLKYVPGMDVLPSHCWISEMVVQLSDSLTDLLDKFSNISEGLSNYSIIDKLVNIVDDLVECVKENSSKDLNKSFKSPEPRLFTPEEFFRIFNRSIDAFKDFVVASETSDCVVSSTLSPEKDSRVSVTKPFMLPPVAASSLRNDSSSSNRKAKNPPGDSSLHWAAMALPALFSLIIGFAFGALYWKKRQPSLTRAVENIQINEEDNEISMLQEKEREFQEV

SEQ ID NO: 1239 - protein, 248 aa, Homo sapiens
  SCF_K99Q
EGICRNRVTNNVKDVTKLVANLPKDYMITLKYVPGMDVLPSHCWISEMVVQLSDSLTDLLDKFSNISEGLSNYSIIDKLVNIVDDLVECVKENSSKDLQKSFKSPEPRLFTPEEFFRIFNRSIDAFKDFVVASETSDCVVSSTLSPEKDSRVSVTKPFMLPPVAASSLRNDSSSSNRKAKNPPGDSSLHWAAMALPALFSLIIGFAFGALYWKKRQPSLTRAVENIQINEEDNEISMLQEKEREFQEV

SEQ ID NO: 1240 - protein, 248 aa, Homo sapiens
  SCF_K100N
EGICRNRVTNNVKDVTKLVANLPKDYMITLKYVPGMDVLPSHCWISEMVVQLSDSLTDLLDKFSNISEGLSNYSIIDKLVNIVDDLVECVKENSSKDLKNSFKSPEPRLFTPEEFFRIFNRSIDAFKDFVVASETSDCVVSSTLSPEKDSRVSVTKPFMLPPVAASSLRNDSSSSNRKAKNPPGDSSLHWAAMALPALFSLIIGFAFGALYWKKRQPSLTRAVENIQINEEDNEISMLQEKEREFQEV

SEQ ID NO: 1241 - protein, 248 aa, Homo sapiens
  SCF_K100Q
EGICRNRVTNNVKDVTKLVANLPKDYMITLKYVPGMDVLPSHCWISEMVVQLSDSLTDLLDKFSNISEGLSNYSIIDKLVNIVDDLVECVKENSSKDLKQSFKSPEPRLFTPEEFFRIFNRSIDAFKDFVVASETSDCVVSSTLSPEKDSRVSVTKPFMLPPVAASSLRNDSSSSNRKAKNPPGDSSLHWAAMALPALFSLIIGFAFGALYWKKRQPSLTRAVENIQINEEDNEISMLQEKEREFQEV

SEQ ID NO: 1242 - protein, 248 aa, Homo sapiens
  SCF_F102I
EGICRNRVTNNVKDVTKLVANLPKDYMITLKYVPGMDVLPSHCWISEMVVQLSDSLTDLLDKFSNISEGLSNYSIIDKLVNIVDDLVECVKENSSKDLKKSIKSPEPRLFTPEEFFRIFNRSIDAFKDFVVASETSDCVVSSTLSPEKDSRVSVTKPFMLPPVAASSLRNDSSSSNRKAKNPPGDSSLHWAAMALPALFSLIIGFAFGALYWKKRQPSLTRAVENIQINEEDNEISMLQEKEREFQEV

SEQ ID NO: 1243 - protein, 248 aa, Homo sapiens
  SCF_F102V
EGICRNRVTNNVKDVTKLVANLPKDYMITLKYVPGMDVLPSHCWISEMVVQLSDSLTDLLDKFSNISEGLSNYSIIDKLVNIVDDLVECVKENSSKDLKKSVKSPEPRLFTPEEFFRIFNRSIDAFKDFVVASETSDCVVSSTLSPEKDSRVSVTKPFMLPPVAASSLRNDSSSSNRKAKNPPGDSSLHWAAMALPALFSLIIGFAFGALYWKKRQPSLTRAVENIQINEEDNEISMLQEKEREFQEV

SEQ ID NO: 1244 - protein, 248 aa, Homo sapiens
  SCF_K103N
EGICRNRVTNNVKDVTKLVANLPKDYMITLKYVPGMDVLPSHCWISEMVVQLSDSLTDLLDKFSNISEGLSNYSIIDKLVNIVDDLVECVKENSSKDLKKSFNSPEPRLFTPEEFFRIFNRSIDAFKDFVVASETSDCVVSSTLSPEKDSRVSVTKPFMLPPVAASSLRNDSSSSNRKAKNPPGDSSLHWAAMALPALFSLIIGFAFGALYWKKRQPSLTRAVENIQINEEDNEISMLQEKEREFQEV

SEQ ID NO: 1245 - protein, 248 aa, Homo sapiens
  SCF_K103Q
EGICRNRVTNNVKDVTKLVANLPKDYMITLKYVPGMDVLPSHCWISEMVVQLSDSLTDLLDKFSNISEGLSNYSIIDKLVNIVDDLVECVKENSSKDLKKSFQSPEPRLFTPEEFFRIFNRSIDAFKDFVVASETSDCVVSSTLSPEKDSRVSVTKPFMLPPVAASSLRNDSSSSNRKAKNPPGDSSLHWAAMALPALFSLIIGFAFGALYWKKRQPSLTRAVENIQINEEDNEISMLQEKEREFQEV

SEQ ID NO: 1246 - protein, 248 aa, Homo sapiens
  SCF_E106N
EGICRNRVTNNVKDVTKLVANLPKDYMITLKYVPGMDVLPSHCWISEMVVQLSDSLTDLLDKFSNISEGLSNYSIIDKLVNIVDDLVECVKENSSKDLKKSFKSPNPRLFTPEEFFRIFNRSIDAFKDFVVASETSDCVVSSTLSPEKDSRVSVTKPFMLPPVAASSLRNDSSSSNRKAKNPPGDSSLHWAAMALPALFSLIIGFAFGALYWKKRQPSLTRAVENIQINEEDNEISMLQEKEREFQEV

SEQ ID NO: 1247 - protein, 248 aa, Homo sapiens
  SCF_E106Q
EGICRNRVTNNVKDVTKLVANLPKDYMITLKYVPGMDVLPSHCWISEMVVQLSDSLTDLLDKFSNISEGLSNYSIIDKLVNIVDDLVECVKENSSKDLKKSFKSPQPRLFTPEEFFRIFNRSIDAFKDFVVASETSDCVVSSTLSPEKDSRVSVTKPFMLPPVAASSLRNDSSSSNRKAKNPPGDSSLHWAAMALPALFSLIIGFAFGALYWKKRQPSLTRAVENIQINEEDNEISMLQEKEREFQEV

SEQ ID NO: 1248 - protein, 248 aa, Homo sapiens
  SCF_E106H
EGICRNRVTNNVKDVTKLVANLPKDYMITLKYVPGMDVLPSHCWISEMVVQLSDSLTDLLDKFSNISEGLSNYSIIDKLVNIVDDLVECVKENSSKDLKKSFKSPHPRLFTPEEFFRIFNRSIDAFKDFVVASETSDCVVSSTLSPEKDSRVSVTKPFMLPPVAASSLRNDSSSSNRKAKNPPGDSSLHWAAMALPALFSLIIGFAFGALYWKKRQPSLTRAVENIQINEEDNEISMLQEKEREFQEV

SEQ ID NO: 1249 - protein, 248 aa, Homo sapiens
  SCF_P107A
EGICRNRVTNNVKDVTKLVANLPKDYMITLKYVPGMDVLPSHCWISEMVVQLSDSLTDLLDKFSNISEGLSNYSIIDKLVNIVDDLVECVKENSSKDLKKSFKSPEARLFTPEEFFRIFNRSIDAFKDFVVASETSDCVVSSTLSPEKDSRVSVTKPFMLPPVAASSLRNDSSSSNRKAKNPPGDSSLHWAAMALPALFSLIIGFAFGALYWKKRQPSLTRAVENIQINEEDNEISMLQEKEREFQEV

SEQ ID NO: 1250 - protein, 248 aa, Homo sapiens
  SCF_P107S
EGICRNRVTNNVKDVTKLVANLPKDYMITLKYVPGMDVLPSHCWISEMVVQLSDSLTDLLDKFSNISEGLSNYSIIDKLVNIVDDLVECVKENSSKDLKKSFKSPESRLFTPEEFFRIFNRSIDAFKDFVVASETSDCVVSSTLSPEKDSRVSVTKPFMLPPVAASSLRNDSSSSNRKAKNPPGDSSLHWAAMALPALFSLIIGFAFGALYWKKRQPSLTRAVENIQINEEDNEISMLQEKEREFQEV

SEQ ID NO: 1251 - protein, 248 aa, Homo sapiens
  SCF_R108H
EGICRNRVTNNVKDVTKLVANLPKDYMITLKYVPGMDVLPSHCWISEMVVQLSDSLTDLLDKFSNISEGLSNYSIIDKLVNIVDDLVECVKENSSKDLKKSFKSPEPHLFTPEEFFRIFNRSIDAFKDFVVASETSDCVVSSTLSPEKDSRVSVTKPFMLPPVAASSLRNDSSSSNRKAKNPPGDSSLHWAAMALPALFSLIIGFAFGALYWKKRQPSLTRAVENIQINEEDNEISMLQEKEREFQEV

SEQ ID NO: 1252 - protein, 248 aa, Homo sapiens
  SCF_R108Q
EGICRNRVTNNVKDVTKLVANLPKDYMITLKYVPGMDVLPSHCWISEMVVQLSDSLTDLLDKFSNISEGLSNYSIIDKLVNIVDDLVECVKENSSKDLKKSFKSPEPQLFTPEEFFRIFNRSIDAFKDFVVASETSDCVVSSTLSPEKDSRVSVTKPFMLPPVAASSLRNDSSSSNRKAKNPPGDSSLHWAAMALPALFSLIIGFAFGALYWKKRQPSLTRAVENIQINEEDNEISMLQEKEREFQEV

SEQ ID NO: 1253 - protein, 248 aa, Homo sapiens
  SCF_L109I
EGICRNRVTNNVKDVTKLVANLPKDYMITLKYVPGMDVLPSHCWISEMVVQLSDSLTDLLDKFSNISEGLSNYSIIDKLVNIVDDLVECVKENSSKDLKKSFKSPEPRIFTPEEFFRIFNRSIDAFKDFVVASETSDCVVSSTLSPEKDSRVSVTKPFMLPPVAASSLRNDSSSSNRKAKNPPGDSSLHWAAMALPALFSLIIGFAFGALYWKKRQPSLTRAVENIQINEEDNEISMLQEKEREFQEV

SEQ ID NO: 1254 - protein, 248 aa, Homo sapiens
  SCF_L109V
EGICRNRVTNNVKDVTKLVANLPKDYMITLKYVPGMDVLPSHCWISEMVVQLSDSLTDLLDKFSNISEGLSNYSIIDKLVNIVDDLVECVKENSSKDLKKSFKSPEPRVFTPEEFFRIFNRSIDAFKDFVVASETSDCVVSSTLSPEKDSRVSVTKPFMLPPVAASSLRNDSSSSNRKAKNPPGDSSLHWAAMALPALFSLIIGFAFGALYWKKRQPSLTRAVENIQINEEDNEISMLQEKEREFQEV

SEQ ID NO: 1255 - protein, 248 aa, Homo sapiens
  SCF_E134N
EGICRNRVTNNVKDVTKLVANLPKDYMITLKYVPGMDVLPSHCWISEMVVQLSDSLTDLLDKFSNISEGLSNYSIIDKLVNIVDDLVECVKENSSKDLKKSFKSPEPRLFTPEEFFRIFNRSIDAFKDFVVASNTSDCVVSSTLSPEKDSRVSVTKPFMLPPVAASSLRNDSSSSNRKAKNPPGDSSLHWAAMALPALFSLIIGFAFGALYWKKRQPSLTRAVENIQINEEDNEISMLQEKEREFQEV

SEQ ID NO: 1256 - protein, 248 aa, Homo sapiens
  SCF_E134Q
EGICRNRVTNNVKDVTKLVANLPKDYMITLKYVPGMDVLPSHCWISEMVVQLSDSLTDLLDKFSNISEGLSNYSIIDKLVNIVDDLVECVKENSSKDLKKSFKSPEPRLFTPEEFFRIFNRSIDAFKDFVVASQTSDCVVSSTLSPEKDSRVSVTKPFMLPPVAASSLRNDSSSSNRKAKNPPGDSSLHWAAMALPALFSLIIGFAFGALYWKKRQPSLTRAVENIQINEEDNEISMLQEKEREFQEV

SEQ ID NO: 1257 - protein, 248 aa, Homo sapiens
  SCF_E134H
EGICRNRVTNNVKDVTKLVANLPKDYMITLKYVPGMDVLPSHCWISEMVVQLSDSLTDLLDKFSNISEGLSNYSIIDKLVNIVDDLVECVKENSSKDLKKSFKSPEPRLFTPEEFFRIFNRSIDAFKDFVVASHTSDCVVSSTLSPEKDSRVSVTKPFMLPPVAASSLRNDSSSSNRKAKNPPGDSSLHWAAMALPALFSLIIGFAFGALYWKKRQPSLTRAVENIQINEEDNEISMLQEKEREFQEV

SEQ ID NO: 1258 - protein, 248 aa, Homo sapiens
  SCF_D137N
EGICRNRVTNNVKDVTKLVANLPKDYMITLKYVPGMDVLPSHCWISEMVVQLSDSLTDLLDKFSNISEGLSNYSIIDKLVNIVDDLVECVKENSSKDLKKSFKSPEPRLFTPEEFFRIFNRSIDAFKDFVVASETSNCVVSSTLSPEKDSRVSVTKPFMLPPVAASSLRNDSSSSNRKAKNPPGDSSLHWAAMALPALFSLIIGFAFGALYWKKRQPSLTRAVENIQINEEDNEISMLQEKEREFQEV

SEQ ID NO: 1259 - protein, 248 aa, Homo sapiens
  SCF_D137Q
EGICRNRVTNNVKDVTKLVANLPKDYMITLKYVPGMDVLPSHCWISEMVVQLSDSLTDLLDKFSNISEGLSNYSIIDKLVNIVDDLVECVKENSSKDLKKSFKSPEPRLFTPEEFFRIFNRSIDAFKDFVVASETSQCVVSSTLSPEKDSRVSVTKPFMLPPVAASSLRNDSSSSNRKAKNPPGDSSLHWAAMALPALFSLIIGFAFGALYWKKRQPSLTRAVENIQINEEDNEISMLQEKEREFQEV

SEQ ID NO: 1260 - protein, 191 aa, Homo sapiens [sequence omitted]

SEQ ID NO: 1261 - protein, 191 aa, Homo sapiens
  SOMA_F1I/P2S
ISTIPLSRLFDNAMLRAHRLHQLAFDTYQEFEEAYIPKEQKYSFLQNPQTSLCFSESIPTPSNREETQQKSNLELLRISLLLIQSWLEPVQFLRSVFANSLVYGASDSNVYDLLKDLEEGIQTLMGRLEDGSPRTGQIFKQTYSKFDTNSHNDDALLKNYGLLYCFRKDMDKVETFLRIVQCRSVEGSCGF

SEQ ID NO: 1262 - protein, 191 aa, Homo sapiens
  SOMA_F1I/P2A
IATIPLSRLFDNAMLRAHRLHQLAFDTYQEFEEAYIPKEQKYSFLQNPQTSLCFSESIPTPSNREETQQKSNLELLRISLLLIQSWLEPVQFLRSVFANSLVYGASDSNVYDLLKDLEEGIQTLMGRLEDGSPRTGQIFKQTYSKFDTNSHNDDALLKNYGLLYCFRKDMDKVETFLRIVQCRSVEGSCGF

SEQ ID NO: 1263 - protein, 191 aa, Homo sapiens
  SOMA_F1V/P2S
VSTIPLSRLFDNAMLRAHRLHQLAFDTYQEFEEAYIPKEQKYSFLQNPQTSLCFSESIPTPSNREETQQKSNLELLRISLLLIQSWLEPVQFLRSVFANSLVYGASDSNVYDLLKDLEEGIQTLMGRLEDGSPRTGQIFKQTYSKFDTNSHNDDALLKNYGLLYCFRKDMDKVETFLRIVQCRSVEGSCGF

SEQ ID NO: 1264 - protein, 191 aa, Homo sapiens
  SOMA_F1V/P2A
VATIPLSRLFDNAMLRAHRLHQLAFDTYQEFEEAYIPKEQKYSFLQNPQTSLCFSESIPTPSNREETQQKSNLELLRISLLLIQSWLEPVQFLRSVFANSLVYGASDSNVYDLLKDLEEGIQTLMGRLEDGSPRTGQIFKQTYSKFDTNSHNDDALLKNYGLLYCFRKDMDKVETFLRIVQCRSVEGSCGF

SEQ ID NO: 1265 - protein, 191 aa, Homo sapiens
  SOMA_P5A
FPTIALSRLFDNAMLRAHRLHQLAFDTYQEFEEAYIPKEQKYSFLQNPQTSLCFSESIPTPSNREETQQKSNLELLRISLLLIQSWLEPVQFLRSVFANSLVYGASDSNVYDLLKDLEEGIQTLMGRLEDGSPRTGQIFKQTYSKFDTNSHNDDALLKNYGLLYCFRKDMDKVETFLRIVQCRSVEGSCGF

SEQ ID NO: 1266 - protein, 191 aa, Homo sapiens
  SOMA_P5S
FPTISLSRLFDNAMLRAHRLHQLAFDTYQEFEEAYIPKEQKYSFLQNPQTSLCFSESIPTPSNREETQQKSNLELLRISLLLIQSWLEPVQFLRSVFANSLVYGASDSNVYDLLKDLEEGIQTLMGRLEDGSPRTGQIFKQTYSKFDTNSHNDDALLKNYGLLYCFRKDMDKVETFLRIVQCRSVEGSCGF

SEQ ID NO: 1267 - protein, 191 aa, Homo sapiens
  SOMA_L6I
FPTIPISRLFDNAMLRAHRLHQLAFDTYQEFEEAYIPKEQKYSFLQNPQTSLCFSESIPTPSNREETQQKSNLELLRISLLLIQSWLEPVQFLRSVFANSLVYGASDSNVYDLLKDLEEGIQTLMGRLEDGSPRTGQIFKQTYSKFDTNSHNDDALLKNYGLLYCFRKDMDKVETFLRIVQCRSVEGSCGF

SEQ ID NO: 1268 - protein, 191 aa, Homo sapiens
  SOMA_L6V
FPTIPVSRLFDNAMLRAHRLHQLAFDTYQEFEEAYIPKEQKYSFLQNPQTSLCFSESIPTPSNREETQQKSNLELLRISLLLIQSWLEPVQFLRSVFANSLVYGASDSNVYDLLKDLEEGIQTLMGRLEDGSPRTGQIFKQTYSKFDTNSHNDDALLKNYGLLYCFRKDMDKVETFLRIVQCRSVEGSCGF

SEQ ID NO: 1269 - protein, 191 aa, Homo sapiens
  SOMA_R8H
FPTIPLSHLFDNAMLRAHRLHQLAFDTYQEFEEAYIPKEQKYSFLQNPQTSLCFSESIPTPSNREETQQKSNLELLRISLLLIQSWLEPVQFLRSVFANSLVYGASDSNVYDLLKDLEEGIQTLMGRLEDGSPRTGQIFKQTYSKFDTNSHNDDALLKNYGLLYCFRKDMDKVETFLRIVQCRSVEGSCGF

SEQ ID NO: 1270 - protein, 191 aa, Homo sapiens
  SOMA_R8Q
FPTIPLSQLFDNAMLRAHRLHQLAFDTYQEFEEAYIPKEQKYSFLQNPQTSLCFSESIPTPSNREETQQKSNLELLRISLLLIQSWLEPVQFLRSVFANSLVYGASDSNVYDLLKDLEEGIQTLMGRLEDGSPRTGQIFKQTYSKFDTNSHNDDALLKNYGLLYCFRKDMDKVETFLRIVQCRSVEGSCGF

SEQ ID NO: 1271 - protein, 191 aa, Homo sapiens
  SOMA_L9I
FPTIPLSRIFDNAMLRAHRLHQLAFDTYQEFEEAYIPKEQKYSFLQNPQTSLCFSESIPTPSNREETQQKSNLELLRISLLLIQSWLEPVQFLRSVFANSLVYGASDSNVYDLLKDLEEGIQTLMGRLEDGSPRTGQIFKQTYSKFDTNSHNDDALLKNYGLLYCFRKDMDKVETFLRIVQCRSVEGSCGF

SEQ ID NO: 1272 - protein, 191 aa, Homo sapiens
  SOMA_L9V
FPTIPLSRVFDNAMLRAHRLHQLAFDTYQEFEEAYIPKEQKYSFLQNPQTSLCFSESIPTPSNREETQQKSNLELLRISLLLIQSWLEPVQFLRSVFANSLVYGASDSNVYDLLKDLEEGIQTLMGRLEDGSPRTGQIFKQTYSKFDTNSHNDDALLKNYGLLYCFRKDMDKVETFLRIVQCRSVEGSCGF

SEQ ID NO: 1273 - protein, 191 aa, Homo sapiens
  SOMA_F10I
FPTIPLSRLIDNAMLRAHRLHQLAFDTYQEFEEAYIPKEQKYSFLQNPQTSLCFSESIPTPSNREETQQKSNLELLRISLLLIQSWLEPVQFLRSVFANSLVYGASDSNVYDLLKDLEEGIQTLMGRLEDGSPRTGQIFKQTYSKFDTNSHNDDALLKNYGLLYCFRKDMDKVETFLRIVQCRSVEGSCGF

SEQ ID NO: 1274 - protein, 191 aa, Homo sapiens
  SOMA_F10V
FPTIPLSRLVDNAMLRAHRLHQLAFDTYQEFEEAYIPKEQKYSFLQNPQTSLCFSESIPTPSNREETQQKSNLELLRISLLLIQSWLEPVQFLRSVFANSLVYGASDSNVYDLLKDLEEGIQTLMGRLEDGSPRTGQIFKQTYSKFDTNSHNDDALLKNYGLLYCFRKDMDKVETFLRIVQCRSVEGSCGF

SEQ ID NO: 1275 - protein, 191 aa, Homo sapiens
  SOMA_D11N
FPTIPLSRLFNNAMLRAHRLHQLAFDTYQEFEEAYIPKEQKYSFLQNPQTSLCFSESIPTPSNREETQQKSNLELLRISLLLIQSWLEPVQFLRSVFANSLVYGASDSNVYDLLKDLEEGIQTLMGRLEDGSPRTGQIFKQTYSKFDTNSHNDDALLKNYGLLYCFRKDMDKVETFLRIVQCRSVEGSCGF

SEQ ID NO: 1276 - protein, 191 aa, Homo sapiens
  SOMA_D11Q
FPTIPLSRLFQNAMLRAHRLHQLAFDTYQEFEEAYIPKEQKYSFLQNPQTSLCFSESIPTPSNREETQQKSNLELLRISLLLIQSWLEPVQFLRSVFANSLVYGASDSNVYDLLKDLEEGIQTLMGRLEDGSPRTGQIFKQTYSKFDTNSHNDDALLKNYGLLYCFRKDMDKVETFLRIVQCRSVEGSCGF

SEQ ID NO: 1277 - protein, 191 aa, Homo sapiens
  SOMA_M14I
FPTIPLSRLFDNAILRAHRLHQLAFDTYQEFEEAYIPKEQKYSFLQNPQTSLCFSESIPTPSNREETQQKSNLELLRISLLLIQSWLEPVQFLRSVFANSLVYGASDSNVYDLLKDLEEGIQTLMGRLEDGSPRTGQIFKQTYSKFDTNSHNDDALLKNYGLLYCFRKDMDKVETFLRIVQCRSVEGSCGF

SEQ ID NO: 1278 - protein, 191 aa, Homo sapiens
  SOMA_M14V
FPTIPLSRLFDNAVLRAHRLHQLAFDTYQEFEEAYIPKEQKYSFLQNPQTSLCFSESIPTPSNREETQQKSNLELLRISLLLIQSWLEPVQFLRSVFANSLVYGASDSNVYDLLKDLEEGIQTLMGRLEDGSPRTGQIFKQTYSKFDTNSHNDDALLKNYGLLYCFRKDMDKVETFLRIVQCRSVEGSCGF

SEQ ID NO: 1279 - protein, 191 aa, Homo sapiens
  SOMA_L15I
FPTIPLSRLFDNAMIRAHRLHQLAFDTYQEFEEAYIPKEQKYSFLQNPQTSLCFSESIPTPSNREETQQKSNLELLRISLLLIQSWLEPVQFLRSVFANSLVYGASDSNVYDLLKDLEEGIQTLMGRLEDGSPRTGQIFKQTYSKFDTNSHNDDALLKNYGLLYCFRKDMDKVETFLRIVQCRSVEGSCGF

SEQ ID NO: 1280 - protein, 191 aa, Homo sapiens
  SOMA_L15V
FPTIPLSRLFDNAMVRAHRLHQLAFDTYQEFEEAYIPKEQKYSFLQNPQTSLCFSESIPTPSNREETQQKSNLELLRISLLLIQSWLEPVQFLRSVFANSLVYGASDSNVYDLLKDLEEGIQTLMGRLEDGSPRTGQIFKQTYSKFDTNSHNDDALLKNYGLLYCFRKDMDKVETFLRIVQCRSVEGSCGF

SEQ ID NO: 1281 - protein, 191 aa, Homo sapiens
  SOMA_R16H
FPTIPLSRLFDNAMLHAHRLHQLAFDTYQEFEEAYIPKEQKYSFLQNPQTSLCFSESIPTPSNREETQQKSNLELLRISLLLIQSWLEPVQFLRSVFANSLVYGASDSNVYDLLKDLEEGIQTLMGRLEDGSPRTGQIFKQTYSKFDTNSHNDDALLKNYGLLYCFRKDMDKVETFLRIVQCRSVEGSCGF

SEQ ID NO: 1282 - protein, 191 aa, Homo sapiens
  SOMA_R16Q
FPTIPLSRLFDNAMLQAHRLHQLAFDTYQEFEEAYIPKEQKYSFLQNPQTSLCFSESIPTPSNREETQQKSNLELLRISLLLIQSWLEPVQFLRSVFANSLVYGASDSNVYDLLKDLEEGIQTLMGRLEDGSPRTGQIFKQTYSKFDTNSHNDDALLKNYGLLYCFRKDMDKVETFLRIVQCRSVEGSCGF

SEQ ID NO: 1283 - protein, 191 aa, Homo sapiens
  SOMA_R19H
FPTIPLSRLFDNAMLRAHHLHQLAFDTYQEFEEAYIPKEQKYSFLQNPQTSLCFSESIPTPSNREETQQKSNLELLRISLLLIQSWLEPVQFLRSVFANSLVYGASDSNVYDLLKDLEEGIQTLMGRLEDGSPRTGQIFKQTYSKFDTNSHNDDALLKNYGLLYCFRKDMDKVETFLRIVQCRSVEGSCGF

SEQ ID NO: 1284 - protein, 191 aa, Homo sapiens
  SOMA_R19Q
FPTIPLSRLFDNAMLRAHQLHQLAFDTYQEFEEAYIPKEQKYSFLQNPQTSLCFSESIPTPSNREETQQKSNLELLRISLLLIQSWLEPVQFLRSVFANSLVYGASDSNVYDLLKDLEEGIQTLMGRLEDGSPRTGQIFKQTYSKFDTNSHNDDALLKNYGLLYCFRKDMDKVETFLRIVQCRSVEGSCGF

SEQ ID NO: 1285 - protein, 191 aa, Homo sapiens
  SOMA_L20I
FPTIPLSRLFDNAMLRAHRIHQLAFDTYQEFEEAYIPKEQKYSFLQNPQTSLCFSESIPTPSNREETQQKSNLELLRISLLLIQSWLEPVQFLRSVFANSLVYGASDSNVYDLLKDLEEGIQTLMGRLEDGSPRTGQIFKQTYSKFDTNSHNDDALLKNYGLLYCFRKDMDKVETFLRIVQCRSVEGSCGF

SEQ ID NO: 1286 - protein, 191 aa, Homo sapiens
  SOMA_L20V
FPTIPLSRLFDNAMLRAHRVHQLAFDTYQEFEEAYIPKEQKYSFLQNPQTSLCFSESIPTPSNREETQQKSNLELLRISLLLIQSWLEPVQFLRSVFANSLVYGASDSNVYDLLKDLEEGIQTLMGRLEDGSPRTGQIFKQTYSKFDTNSHNDDALLKNYGLLYCFRKDMDKVETFLRIVQCRSVEGSCGF

SEQ ID NO: 1287 - protein, 191 aa, Homo sapiens
  SOMA_L23I
FPTIPLSRLFDNAMLRAHRLHQIAFDTYQEFEEAYIPKEQKYSFLQNPQTSLCFSESIPTPSNREETQQKSNLELLRISLLLIQSWLEPVQFLRSVFANSLVYGASDSNVYDLLKDLEEGIQTLMGRLEDGSPRTGQIFKQTYSKFDTNSHNDDALLKNYGLLYCFRKDMDKVETFLRIVQCRSVEGSCGF

SEQ ID NO: 1288 - protein, 191 aa, Homo sapiens
  SOMA_L23V
FPTIPLSRLFDNAMLRAHRLHQVAFDTYQEFEEAYIPKEQKYSFLQNPQTSLCFSESIPTPSNREETQQKSNLELLRISLLLIQSWLEPVQFLRSVFANSLVYGASDSNVYDLLKDLEEGIQTLMGRLEDGSPRTGQIFKQTYSKFDTNSHNDDALLKNYGLLYCFRKDMDKVETFLRIVQCRSVEGSCGF

SEQ ID NO: 1289 - protein, 191 aa, Homo sapiens
  SOMA_F25I
FPTIPLSRLFDNAMLRAHRLHQLAIDTYQEFEEAYIPKEQKYSFLQNPQTSLCFSESIPTPSNREETQQKSNLELLRISLLLIQSWLEPVQFLRSVFANSLVYGASDSNVYDLLKDLEEGIQTLMGRLEDGSPRTGQIFKQTYSKFDTNSHNDDALLKNYGLLYCFRKDMDKVETFLRIVQCRSVEGSCGF

SEQ ID NO: 1290 - protein, 191 aa, Homo sapiens
  SOMA_F25V
FPTIPLSRLFDNAMLRAHRLHQLAVDTYQEFEEAYIPKEQKYSFLQNPQTSLCFSESIPTPSNREETQQKSNLELLRISLLLIQSWLEPVQFLRSVFANSLVYGASDSNVYDLLKDLEEGIQTLMGRLEDGSPRTGQIFKQTYSKFDTNSHNDDALLKNYGLLYCFRKDMDKVETFLRIVQCRSVEGSCGF

SEQ ID NO: 1291 - protein, 191 aa, Homo sapiens
  SOMA_D26N
FPTIPLSRLFDNAMLRAHRLHQLAFNTYQEFEEAYIPKEQKYSFLQNPQTSLCFSESIPTPSNREETQQKSNLELLRISLLLIQSWLEPVQFLRSVFANSLVYGASDSNVYDLLKDLEEGIQTLMGRLEDGSPRTGQIFKQTYSKFDTNSHNDDALLKNYGLLYCFRKDMDKVETFLRIVQCRSVEGSCGF

SEQ ID NO: 1292 - protein, 191 aa, Homo sapiens
  SOMA_D26Q
FPTIPLSRLFDNAMLRAHRLHQLAFQTYQEFEEAYIPKEQKYSFLQNPQTSLCFSESIPTPSNREETQQKSNLELLRISLLLIQSWLEPVQFLRSVFANSLVYGASDSNVYDLLKDLEEGIQTLMGRLEDGSPRTGQIFKQTYSKFDTNSHNDDALLKNYGLLYCFRKDMDKVETFLRIVQCRSVEGSCGF

SEQ ID NO: 1293 - protein, 191 aa, Homo sapiens
  SOMA_Y28H
FPTIPLSRLFDNAMLRAHRLHQLAFDTHQEFEEAYIPKEQKYSFLQNPQTSLCFSESIPTPSNREETQQKSNLELLRISLLLIQSWLEPVQFLRSVFANSLVYGASDSNVYDLLKDLEEGIQTLMGRLEDGSPRTGQIFKQTYSKFDTNSHNDDALLKNYGLLYCFRKDMDKVETFLRIVQCRSVEGSCGF

SEQ ID NO: 1294 - protein, 191 aa, Homo sapiens
  SOMA_Y28I
FPTIPLSRLFDNAMLRAHRLHQLAFDTIQEFEEAYIPKEQKYSFLQNPQTSLCFSESIPTPSNREETQQKSNLELLRISLLLIQSWLEPVQFLRSVFANSLVYGASDSNVYDLLKDLEEGIQTLMGRLEDGSPRTGQIFKQTYSKFDTNSHNDDALLKNYGLLYCFRKDMDKVETFLRIVQCRSVEGSCGF

SEQ ID NO: 1295 - protein, 191 aa, Homo sapiens
  SOMA_E30N
FPTIPLSRLFDNAMLRAHRLHQLAFDTYQNFEEAYIPKEQKYSFLQNPQTSLCFSESIPTPSNREETQQKSNLELLRISLLLIQSWLEPVQFLRSVFANSLVYGASDSNVYDLLKDLEEGIQTLMGRLEDGSPRTGQIFKQTYSKFDTNSHNDDALLKNYGLLYCFRKDMDKVETFLRIVQCRSVEGSCGF

SEQ ID NO: 1296 - protein, 191 aa, Homo sapiens
  SOMA_E30Q
FPTIPLSRLFDNAMLRAHRLHQLAFDTYQQFEEAYIPKEQKYSFLQNPQTSLCFSESIPTPSNREETQQKSNLELLRISLLLIQSWLEPVQFLRSVFANSLVYGASDSNVYDLLKDLEEGIQTLMGRLEDGSPRTGQIFKQTYSKFDTNSHNDDALLKNYGLLYCFRKDMDKVETFLRIVQCRSVEGSCGF

SEQ ID NO: 1297 - protein, 191 aa, Homo sapiens
  SOMA_E30H
FPTIPLSRLFDNAMLRAHRLHQLAFDTYQHFEEAYIPKEQKYSFLQNPQTSLCFSESIPTPSNREETQQKSNLELLRISLLLIQSWLEPVQFLRSVFANSLVYGASDSNVYDLLKDLEEGIQTLMGRLEDGSPRTGQIFKQTYSKFDTNSHNDDALLKNYGLLYCFRKDMDKVETFLRIVQCRSVEGSCGF

SEQ ID NO: 1298 - protein, 191 aa, Homo sapiens
  SOMA_F31I
FPTIPLSRLFDNAMLRAHRLHQLAFDTYQEIEEAYIPKEQKYSFLQNPQTSLCFSESIPTPSNREETQQKSNLELLRISLLLIQSWLEPVQFLRSVFANSLVYGASDSNVYDLLKDLEEGIQTLMGRLEDGSPRTGQIFKQTYSKFDTNSHNDDALLKNYGLLYCFRKDMDKVETFLRIVQCRSVEGSCGF

SEQ ID NO: 1299 - protein, 191 aa, Homo sapiens
  SOMA_F31V
FPTIPLSRLFDNAMLRAHRLHQLAFDTYQEVEEAYIPKEQKYSFLQNPQTSLCFSESIPTPSNREETQQKSNLELLRISLLLIQSWLEPVQFLRSVFANSLVYGASDSNVYDLLKDLEEGIQTLMGRLEDGSPRTGQIFKQTYSKFDTNSHNDDALLKNYGLLYCFRKDMDKVETFLRIVQCRSVEGSCGF

SEQ ID NO: 1300 - protein, 191 aa, Homo sapiens
  SOMA_E32N
FPTIPLSRLFDNAMLRAHRLHQLAFDTYQEFNEAYIPKEQKYSFLQNPQTSLCFSESIPTPSNREETQQKSNLELLRISLLLIQSWLEPVQFLRSVFANSLVYGASDSNVYDLLKDLEEGIQTLMGRLEDGSPRTGQIFKQTYSKFDTNSHNDDALLKNYGLLYCFRKDMDKVETFLRIVQCRSVEGSCGF

SEQ ID NO: 1301 - protein, 191 aa, Homo sapiens
  SOMA_E32Q
FPTIPLSRLFDNAMLRAHRLHQLAFDTYQEFQEAYIPKEQKYSFLQNPQTSLCFSESIPTPSNREETQQKSNLELLRISLLLIQSWLEPVQFLRSVFANSLVYGASDSNVYDLLKDLEEGIQTLMGRLEDGSPRTGQIFKQTYSKFDTNSHNDDALLKNYGLLYCFRKDMDKVETFLRIVQCRSVEGSCGF

SEQ ID NO: 1302 - protein, 191 aa, Homo sapiens
  SOMA_E32H
FPTIPLSRLFDNAMLRAHRLHQLAFDTYQEFHEAYIPKEQKYSFLQNPQTSLCFSESIPTPSNREETQQKSNLELLRISLLLIQSWLEPVQFLRSVFANSLVYGASDSNVYDLLKDLEEGIQTLMGRLEDGSPRTGQIFKQTYSKFDTNSHNDDALLKNYGLLYCFRKDMDKVETFLRIVQCRSVEGSCGF

SEQ ID NO: 1303 - protein, 191 aa, Homo sapiens
  SOMA_E33N
FPTIPLSRLFDNAMLRAHRLHQLAFDTYQEFENAYIPKEQKYSFLQNPQTSLCFSESIPTPSNREETQQKSNLELLRISLLLIQSWLEPVQFLRSVFANSLVYGASDSNVYDLLKDLEEGIQTLMGRLEDGSPRTGQIFKQTYSKFDTNSHNDDALLKNYGLLYCFRKDMDKVETFLRIVQCRSVEGSCGF

SEQ ID NO: 1304 - protein, 191 aa, Homo sapiens
  SOMA_E33Q
FPTIPLSRLFDNAMLRAHRLHQLAFDTYQEFEQAYIPKEQKYSFLQNPQTSLCFSESIPTPSNREETQQKSNLELLRISLLLIQSWLEPVQFLRSVFANSLVYGASDSNVYDLLKDLEEGIQTLMGRLEDGSPRTGQIFKQTYSKFDTNSHNDDALLKNYGLLYCFRKDMDKVETFLRIVQCRSVEGSCGF

SEQ ID NO: 1305 - protein, 191 aa, Homo sapiens
  SOMA_E33H
FPTIPLSRLFDNAMLRAHRLHQLAFDTYQEFEHAYIPKEQKYSFLQNPQTSLCFSESIPTPSNREETQQKSNLELLRISLLLIQSWLEPVQFLRSVFANSLVYGASDSNVYDLLKDLEEGIQTLMGRLEDGSPRTGQIFKQTYSKFDTNSHNDDALLKNYGLLYCFRKDMDKVETFLRIVQCRSVEGSCGF

SEQ ID NO: 1306 - protein, 191 aa, Homo sapiens
  SOMA_Y35H
FPTIPLSRLFDNAMLRAHRLHQLAFDTYQEFEEAHIPKEQKYSFLQNPQTSLCFSESIPTPSNREETQQKSNLELLRISLLLIQSWLEPVQFLRSVFANSLVYGASDSNVYDLLKDLEEGIQTLMGRLEDGSPRTGQIFKQTYSKFDTNSHNDDALLKNYGLLYCFRKDMDKVETFLRIVQCRSVEGSCGF

SEQ ID NO: 1307 - protein, 191 aa, Homo sapiens
  SOMA_Y35I
FPTIPLSRLFDNAMLRAHRLHQLAFDTYQEFEEAIIPKEQKYSFLQNPQTSLCFSESIPTPSNREETQQKSNLELLRISLLLIQSWLEPVQFLRSVFANSLVYGASDSNVYDLLKDLEEGIQTLMGRLEDGSPRTGQIFKQTYSKFDTNSHNDDALLKNYGLLYCFRKDMDKVETFLRIVQCRSVEGSCGF

SEQ ID NO: 1308 - protein, 191 aa, Homo sapiens
  SOMA_P37A
FPTIPLSRLFDNAMLRAHRLHQLAFDTYQEFEEAYIAKEQKYSFLQNPQTSLCFSESIPTPSNREETQQKSNLELLRISLLLIQSWLEPVQFLRSVFANSLVYGASDSNVYDLLKDLEEGIQTLMGRLEDGSPRTGQIFKQTYSKFDTNSHNDDALLKNYGLLYCFRKDMDKVETFLRIVQCRSVEGSCGF

SEQ ID NO: 1309 - protein, 191 aa, Homo sapiens
  SOMA_P37S
FPTIPLSRLFDNAMLRAHRLHQLAFDTYQEFEEAYISKEQKYSFLQNPQTSLCFSESIPTPSNREETQQKSNLELLRISLLLIQSWLEPVQFLRSVFANSLVYGASDSNVYDLLKDLEEGIQTLMGRLEDGSPRTGQIFKQTYSKFDTNSHNDDALLKNYGLLYCFRKDMDKVETFLRIVQCRSVEGSCGF

SEQ ID NO: 1310 - protein, 191 aa, Homo sapiens
  SOMA_K38N
FPTIPLSRLFDNAMLRAHRLHQLAFDTYQEFEEAYIPNEQKYSFLQNPQTSLCFSESIPTPSNREETQQKSNLELLRISLLLIQSWLEPVQFLRSVFANSLVYGASDSNVYDLLKDLEEGIQTLMGRLEDGSPRTGQIFKQTYSKFDTNSHNDDALLKNYGLLYCFRKDMDKVETFLRIVQCRSVEGSCGF

SEQ ID NO: 1311 - protein, 191 aa, Homo sapiens
  SOMA_K38Q
FPTIPLSRLFDNAMLRAHRLHQLAFDTYQEFEEAYIPQEQKYSFLQNPQTSLCFSESIPTPSNREETQQKSNLELLRISLLLIQSWLEPVQFLRSVFANSLVYGASDSNVYDLLKDLEEGIQTLMGRLEDGSPRTGQIFKQTYSKFDTNSHNDDALLKNYGLLYCFRKDMDKVETFLRIVQCRSVEGSCGF

SEQ ID NO: 1312 - protein, 191 aa, Homo sapiens
  SOMA_E39N
FPTIPLSRLFDNAMLRAHRLHQLAFDTYQEFEEAYIPKNQKYSFLQNPQTSLCFSESIPTPSNREETQQKSNLELLRISLLLIQSWLEPVQFLRSVFANSLVYGASDSNVYDLLKDLEEGIQTLMGRLEDGSPRTGQIFKQTYSKFDTNSHNDDALLKNYGLLYCFRKDMDKVETFLRIVQCRSVEGSCGF

SEQ ID NO: 1313 - protein, 191 aa, Homo sapiens
  SOMA_E39Q
FPTIPLSRLFDNAMLRAHRLHQLAFDTYQEFEEAYIPKQQKYSFLQNPQTSLCFSESIPTPSNREETQQKSNLELLRISLLLIQSWLEPVQFLRSVFANSLVYGASDSNVYDLLKDLEEGIQTLMGRLEDGSPRTGQIFKQTYSKFDTNSHNDDALLKNYGLLYCFRKDMDKVETFLRIVQCRSVEGSCGF

SEQ ID NO: 1314 - protein, 191 aa, Homo sapiens
  SOMA_E39H
FPTIPLSRLFDNAMLRAHRLHQLAFDTYQEFEEAYIPKHQKYSFLQNPQTSLCFSESIPTPSNREETQQKSNLELLRISLLLIQSWLEPVQFLRSVFANSLVYGASDSNVYDLLKDLEEGIQTLMGRLEDGSPRTGQIFKQTYSKFDTNSHNDDALLKNYGLLYCFRKDMDKVETFLRIVQCRSVEGSCGF

SEQ ID NO: 1315 - protein, 191 aa, Homo sapiens
  SOMA_K41N
FPTIPLSRLFDNAMLRAHRLHQLAFDTYQEFEEAYIPKEQNYSFLQNPQTSLCFSESIPTPSNREETQQKSNLELLRISLLLIQSWLEPVQFLRSVFANSLVYGASDSNVYDLLKDLEEGIQTLMGRLEDGSPRTGQIFKQTYSKFDTNSHNDDALLKNYGLLYCFRKDMDKVETFLRIVQCRSVEGSCGF

SEQ ID NO: 1316 - protein, 191 aa, Homo sapiens
  SOMA_K41Q
FPTIPLSRLFDNAMLRAHRLHQLAFDTYQEFEEAYIPKEQQYSFLQNPQTSLCFSESIPTPSNREETQQKSNLELLRISLLLIQSWLEPVQFLRSVFANSLVYGASDSNVYDLLKDLEEGIQTLMGRLEDGSPRTGQIFKQTYSKFDTNSHNDDALLKNYGLLYCFRKDMDKVETFLRIVQCRSVEGSCGF

SEQ ID NO: 1317 - protein, 191 aa, Homo sapiens
  SOMA_Y42H
FPTIPLSRLFDNAMLRAHRLHQLAFDTYQEFEEAYIPKEQKHSFLQNPQTSLCFSESIPTPSNREETQQKSNLELLRISLLLIQSWLEPVQFLRSVFANSLVYGASDSNVYDLLKDLEEGIQTLMGRLEDGSPRTGQIFKQTYSKFDTNSHNDDALLKNYGLLYCFRKDMDKVETFLRIVQCRSVEGSCGF

SEQ ID NO: 1318 - protein, 191 aa, Homo sapiens
  SOMA_Y42I
FPTIPLSRLFDNAMLRAHRLHQLAFDTYQEFEEAYIPKEQKISFLQNPQTSLCFSESIPTPSNREETQQKSNLELLRISLLLIQSWLEPVQFLRSVFANSLVYGASDSNVYDLLKDLEEGIQTLMGRLEDGSPRTGQIFKQTYSKFDTNSHNDDALLKNYGLLYCFRKDMDKVETFLRIVQCRSVEGSCGF

SEQ ID NO: 1319 - protein, 191 aa, Homo sapiens
  SOMA_F44I
FPTIPLSRLFDNAMLRAHRLHQLAFDTYQEFEEAYIPKEQKYSILQNPQTSLCFSESIPTPSNREETQQKSNLELLRISLLLIQSWLEPVQFLRSVFANSLVYGASDSNVYDLLKDLEEGIQTLMGRLEDGSPRTGQIFKQTYSKFDTNSHNDDALLKNYGLLYCFRKDMDKVETFLRIVQCRSVEGSCGF

SEQ ID NO: 1320 - protein, 191 aa, Homo sapiens
  SOMA_F44V
FPTIPLSRLFDNAMLRAHRLHQLAFDTYQEFEEAYIPKEQKYSVLQNPQTSLCFSESIPTPSNREETQQKSNLELLRISLLLIQSWLEPVQFLRSVFANSLVYGASDSNVYDLLKDLEEGIQTLMGRLEDGSPRTGQIFKQTYSKFDTNSHNDDALLKNYGLLYCFRKDMDKVETFLRIVQCRSVEGSCGF

SEQ ID NO: 1321 - protein, 191 aa, Homo sapiens
  SOMA_L45I
FPTIPLSRLFDNAMLRAHRLHQLAFDTYQEFEEAYIPKEQKYSFIQNPQTSLCFSESIPTPSNREETQQKSNLELLRISLLLIQSWLEPVQFLRSVFANSLVYGASDSNVYDLLKDLEEGIQTLMGRLEDGSPRTGQIFKQTYSKFDTNSHNDDALLKNYGLLYCFRKDMDKVETFLRIVQCRSVEGSCGF

SEQ ID NO: 1322 - protein, 191 aa, Homo sapiens
  SOMA_L45V
FPTIPLSRLFDNAMLRAHRLHQLAFDTYQEFEEAYIPKEQKYSFVQNPQTSLCFSESIPTPSNREETQQKSNLELLRISLLLIQSWLEPVQFLRSVFANSLVYGASDSNVYDLLKDLEEGIQTLMGRLEDGSPRTGQIFKQTYSKFDTNSHNDDALLKNYGLLYCFRKDMDKVETFLRIVQCRSVEGSCGF

SEQ ID NO: 1323 - protein, 191 aa, Homo sapiens
  SOMA_P48A
FPTIPLSRLFDNAMLRAHRLHQLAFDTYQEFEEAYIPKEQKYSFLQNAQTSLCFSESIPTPSNREETQQKSNLELLRISLLLIQSWLEPVQFLRSVFANSLVYGASDSNVYDLLKDLEEGIQTLMGRLEDGSPRTGQIFKQTYSKFDTNSHNDDALLKNYGLLYCFRKDMDKVETFLRIVQCRSVEGSCGF

SEQ ID NO: 1324 - protein, 191 aa, Homo sapiens
  SOMA_P48S
FPTIPLSRLFDNAMLRAHRLHQLAFDTYQEFEEAYIPKEQKYSFLQNSQTSLCFSESIPTPSNREETQQKSNLELLRISLLLIQSWLEPVQFLRSVFANSLVYGASDSNVYDLLKDLEEGIQTLMGRLEDGSPRTGQIFKQTYSKFDTNSHNDDALLKNYGLLYCFRKDMDKVETFLRIVQCRSVEGSCGF

SEQ ID NO: 1325 - protein, 191 aa, Homo sapiens
  SOMA_L52I
FPTIPLSRLFDNAMLRAHRLHQLAFDTYQEFEEAYIPKEQKYSFLQNPQTSICFSESIPTPSNREETQQKSNLELLRISLLLIQSWLEPVQFLRSVFANSLVYGASDSNVYDLLKDLEEGIQTLMGRLEDGSPRTGQIFKQTYSKFDTNSHNDDALLKNYGLLYCFRKDMDKVETFLRIVQCRSVEGSCGF

SEQ ID NO: 1326 - protein, 191 aa, Homo sapiens
  SOMA_L52V
FPTIPLSRLFDNAMLRAHRLHQLAFDTYQEFEEAYIPKEQKYSFLQNPQTSVCFSESIPTPSNREETQQKSNLELLRISLLLIQSWLEPVQFLRSVFANSLVYGASDSNVYDLLKDLEEGIQTLMGRLEDGSPRTGQIFKQTYSKFDTNSHNDDALLKNYGLLYCFRKDMDKVETFLRIVQCRSVEGSCGF

SEQ ID NO: 1327 - protein, 191 aa, Homo sapiens
  SOMA_F54I
FPTIPLSRLFDNAMLRAHRLHQLAFDTYQEFEEAYIPKEQKYSFLQNPQTSLCISESIPTPSNREETQQKSNLELLRISLLLIQSWLEPVQFLRSVFANSLVYGASDSNVYDLLKDLEEGIQTLMGRLEDGSPRTGQIFKQTYSKFDTNSHNDDALLKNYGLLYCFRKDMDKVETFLRIVQCRSVEGSCGF

SEQ ID NO: 1328 - protein, 191 aa, Homo sapiens
  SOMA_F54V
FPTIPLSRLFDNAMLRAHRLHQLAFDTYQEFEEAYIPKEQKYSFLQNPQTSLCVSESIPTPSNREETQQKSNLELLRISLLLIQSWLEPVQFLRSVFANSLVYGASDSNVYDLLKDLEEGIQTLMGRLEDGSPRTGQIFKQTYSKFDTNSHNDDALLKNYGLLYCFRKDMDKVETFLRIVQCRSVEGSCGF

SEQ ID NO: 1329 - protein, 191 aa, Homo sapiens
  SOMA_E56N
FPTIPLSRLFDNAMLRAHRLHQLAFDTYQEFEEAYIPKEQKYSFLQNPQTSLCFSNSIPTPSNREETQQKSNLELLRISLLLIQSWLEPVQFLRSVFANSLVYGASDSNVYDLLKDLEEGIQTLMGRLEDGSPRTGQIFKQTYSKFDTNSHNDDALLKNYGLLYCFRKDMDKVETFLRIVQCRSVEGSCGF

SEQ ID NO: 1330 - protein, 191 aa, Homo sapiens
  SOMA_E56Q
FPTIPLSRLFDNAMLRAHRLHQLAFDTYQEFEEAYIPKEQKYSFLQNPQTSLCFSQSIPTPSNREETQQKSNLELLRISLLLIQSWLEPVQFLRSVFANSLVYGASDSNVYDLLKDLEEGIQTLMGRLEDGSPRTGQIFKQTYSKFDTNSHNDDALLKNYGLLYCFRKDMDKVETFLRIVQCRSVEGSCGF

SEQ ID NO: 1331 - protein, 191 aa, Homo sapiens
  SOMA_E56H
FPTIPLSRLFDNAMLRAHRLHQLAFDTYQEFEEAYIPKEQKYSFLQNPQTSLCFSHSIPTPSNREETQQKSNLELLRISLLLIQSWLEPVQFLRSVFANSLVYGASDSNVYDLLKDLEEGIQTLMGRLEDGSPRTGQIFKQTYSKFDTNSHNDDALLKNYGLLYCFRKDMDKVETFLRIVQCRSVEGSCGF

SEQ ID NO: 1332 - protein, 191 aa, Homo sapiens
  SOMA_P59A
FPTIPLSRLFDNAMLRAHRLHQLAFDTYQEFEEAYIPKEQKYSFLQNPQTSLCFSESIATPSNREETQQKSNLELLRISLLLIQSWLEPVQFLRSVFANSLVYGASDSNVYDLLKDLEEGIQTLMGRLEDGSPRTGQIFKQTYSKFDTNSHNDDALLKNYGLLYCFRKDMDKVETFLRIVQCRSVEGSCGF

SEQ ID NO: 1333 - protein, 191 aa, Homo sapiens
  SOMA_P59S
FPTIPLSRLFDNAMLRAHRLHQLAFDTYQEFEEAYIPKEQKYSFLQNPQTSLCFSESISTPSNREETQQKSNLELLRISLLLIQSWLEPVQFLRSVFANSLVYGASDSNVYDLLKDLEEGIQTLMGRLEDGSPRTGQIFKQTYSKFDTNSHNDDALLKNYGLLYCFRKDMDKVETFLRIVQCRSVEGSCGF

SEQ ID NO: 1334 - protein, 191 aa, Homo sapiens
  SOMA_P61A
FPTIPLSRLFDNAMLRAHRLHQLAFDTYQEFEEAYIPKEQKYSFLQNPQTSLCFSESIPTASNREETQQKSNLELLRISLLLIQSWLEPVQFLRSVFANSLVYGASDSNVYDLLKDLEEGIQTLMGRLEDGSPRTGQIFKQTYSKFDTNSHNDDALLKNYGLLYCFRKDMDKVETFLRIVQCRSVEGSCGF

SEQ ID NO: 1335 - protein, 191 aa, Homo sapiens
  SOMA_P61S
FPTIPLSRLFDNAMLRAHRLHQLAFDTYQEFEEAYIPKEQKYSFLQNPQTSLCFSESIPTSSNREETQQKSNLELLRISLLLIQSWLEPVQFLRSVFANSLVYGASDSNVYDLLKDLEEGIQTLMGRLEDGSPRTGQIFKQTYSKFDTNSHNDDALLKNYGLLYCFRKDMDKVETFLRIVQCRSVEGSCGF

SEQ ID NO: 1336 - protein, 191 aa, Homo sapiens
  SOMA_R64H
FPTIPLSRLFDNAMLRAHRLHQLAFDTYQEFEEAYIPKEQKYSFLQNPQTSLCFSESIPTPSNHEETQQKSNLELLRISLLLIQSWLEPVQFLRSVFANSLVYGASDSNVYDLLKDLEEGIQTLMGRLEDGSPRTGQIFKQTYSKFDTNSHNDDALLKNYGLLYCFRKDMDKVETFLRIVQCRSVEGSCGF

SEQ ID NO: 1337 - protein, 191 aa, Homo sapiens
  SOMA_R64Q
FPTIPLSRLFDNAMLRAHRLHQLAFDTYQEFEEAYIPKEQKYSFLQNPQTSLCFSESIPTPSNQEETQQKSNLELLRISLLLIQSWLEPVQFLRSVFANSLVYGASDSNVYDLLKDLEEGIQTLMGRLEDGSPRTGQIFKQTYSKFDTNSHNDDALLKNYGLLYCFRKDMDKVETFLRIVQCRSVEGSCGF

SEQ ID NO: 1338 - protein, 191 aa, Homo sapiens
  SOMA_E65N
FPTIPLSRLFDNAMLRAHRLHQLAFDTYQEFEEAYIPKEQKYSFLQNPQTSLCFSESIPTPSNRNETQQKSNLELLRISLLLIQSWLEPVQFLRSVFANSLVYGASDSNVYDLLKDLEEGIQTLMGRLEDGSPRTGQIFKQTYSKFDTNSHNDDALLKNYGLLYCFRKDMDKVETFLRIVQCRSVEGSCGF

SEQ ID NO: 1339 - protein, 191 aa, Homo sapiens
  SOMA_E65Q
FPTIPLSRLFDNAMLRAHRLHQLAFDTYQEFEEAYIPKEQKYSFLQNPQTSLCFSESIPTPSNRQETQQKSNLELLRISLLLIQSWLEPVQFLRSVFANSLVYGASDSNVYDLLKDLEEGIQTLMGRLEDGSPRTGQIFKQTYSKFDTNSHNDDALLKNYGLLYCFRKDMDKVETFLRIVQCRSVEGSCGF

SEQ ID NO: 1340 - protein, 191 aa, Homo sapiens
  SOMA_E65H
FPTIPLSRLFDNAMLRAHRLHQLAFDTYQEFEEAYIPKEQKYSFLQNPQTSLCFSESIPTPSNRHETQQKSNLELLRISLLLIQSWLEPVQFLRSVFANSLVYGASDSNVYDLLKDLEEGIQTLMGRLEDGSPRTGQIFKQTYSKFDTNSHNDDALLKNYGLLYCFRKDMDKVETFLRIVQCRSVEGSCGF

SEQ ID NO: 1341 - protein, 191 aa, Homo sapiens
  SOMA_E66N
FPTIPLSRLFDNAMLRAHRLHQLAFDTYQEFEEAYIPKEQKYSFLQNPQTSLCFSESIPTPSNRENTQQKSNLELLRISLLLIQSWLEPVQFLRSVFANSLVYGASDSNVYDLLKDLEEGIQTLMGRLEDGSPRTGQIFKQTYSKFDTNSHNDDALLKNYGLLYCFRKDMDKVETFLRIVQCRSVEGSCGF

SEQ ID NO: 1342 - protein, 191 aa, Homo sapiens
  SOMA_E66Q
FPTIPLSRLFDNAMLRAHRLHQLAFDTYQEFEEAYIPKEQKYSFLQNPQTSLCFSESIPTPSNREQTQQKSNLELLRISLLLIQSWLEPVQFLRSVFANSLVYGASDSNVYDLLKDLEEGIQTLMGRLEDGSPRTGQIFKQTYSKFDTNSHNDDALLKNYGLLYCFRKDMDKVETFLRIVQCRSVEGSCGF

SEQ ID NO: 1343 - protein, 191 aa, Homo sapiens
  SOMA_E66H
FPTIPLSRLFDNAMLRAHRLHQLAFDTYQEFEEAYIPKEQKYSFLQNPQTSLCFSESIPTPSNREHTQQKSNLELLRISLLLIQSWLEPVQFLRSVFANSLVYGASDSNVYDLLKDLEEGIQTLMGRLEDGSPRTGQIFKQTYSKFDTNSHNDDALLKNYGLLYCFRKDMDKVETFLRIVQCRSVEGSCGF

SEQ ID NO: 1344 - protein, 191 aa, Homo sapiens
  SOMA_K70N
FPTIPLSRLFDNAMLRAHRLHQLAFDTYQEFEEAYIPKEQKYSFLQNPQTSLCFSESIPTPSNREETQQNSNLELLRISLLLIQSWLEPVQFLRSVFANSLVYGASDSNVYDLLKDLEEGIQTLMGRLEDGSPRTGQIFKQTYSKFDTNSHNDDALLKNYGLLYCFRKDMDKVETFLRIVQCRSVEGSCGF

SEQ ID NO: 1345 - protein, 191 aa, Homo sapiens
  SOMA_K70Q
FPTIPLSRLFDNAMLRAHRLHQLAFDTYQEFEEAYIPKEQKYSFLQNPQTSLCFSESIPTPSNREETQQQSNLELLRISLLLIQSWLEPVQFLRSVFANSLVYGASDSNVYDLLKDLEEGIQTLMGRLEDGSPRTGQIFKQTYSKFDTNSHNDDALLKNYGLLYCFRKDMDKVETFLRIVQCRSVEGSCGF

SEQ ID NO: 1346 - protein, 191 aa, Homo sapiens
  SOMA_L73I
FPTIPLSRLFDNAMLRAHRLHQLAFDTYQEFEEAYIPKEQKYSFLQNPQTSLCFSESIPTPSNREETQQKSNIELLRISLLLIQSWLEPVQFLRSVFANSLVYGASDSNVYDLLKDLEEGIQTLMGRLEDGSPRTGQIFKQTYSKFDTNSHNDDALLKNYGLLYCFRKDMDKVETFLRIVQCRSVEGSCGF

SEQ ID NO: 1347 - protein, 191 aa, Homo sapiens
  SOMA_L73V
FPTIPLSRLFDNAMLRAHRLHQLAFDTYQEFEEAYIPKEQKYSFLQNPQTSLCFSESIPTPSNREETQQKSNVELLRISLLLIQSWLEPVQFLRSVFANSLVYGASDSNVYDLLKDLEEGIQTLMGRLEDGSPRTGQIFKQTYSKFDTNSHNDDALLKNYGLLYCFRKDMDKVETFLRIVQCRSVEGSCGF

SEQ ID NO: 1348 - protein, 191 aa, Homo sapiens
  SOMA_E74N
FPTIPLSRLFDNAMLRAHRLHQLAFDTYQEFEEAYIPKEQKYSFLQNPQTSLCFSESIPTPSNREETQQKSNLNLLRISLLLIQSWLEPVQFLRSVFANSLVYGASDSNVYDLLKDLEEGIQTLMGRLEDGSPRTGQIFKQTYSKFDTNSHNDDALLKNYGLLYCFRKDMDKVETFLRIVQCRSVEGSCGF

SEQ ID NO: 1349 - protein, 191 aa, Homo sapiens
  SOMA_E74Q
FPTIPLSRLFDNAMLRAHRLHQLAFDTYQEFEEAYIPKEQKYSFLQNPQTSLCFSESIPTPSNREETQQKSNLQLLRISLLLIQSWLEPVQFLRSVFANSLVYGASDSNVYDLLKDLEEGIQTLMGRLEDGSPRTGQIFKQTYSKFDTNSHNDDALLKNYGLLYCFRKDMDKVETFLRIVQCRSVEGSCGF

SEQ ID NO: 1350 - protein, 191 aa, Homo sapiens
  SOMA_E74H
FPTIPLSRLFDNAMLRAHRLHQLAFDTYQEFEEAYIPKEQKYSFLQNPQTSLCFSESIPTPSNREETQQKSNLHLLRISLLLIQSWLEPVQFLRSVFANSLVYGASDSNVYDLLKDLEEGIQTLMGRLEDGSPRTGQIFKQTYSKFDTNSHNDDALLKNYGLLYCFRKDMDKVETFLRIVQCRSVEGSCGF

SEQ ID NO: 1351 - protein, 191 aa, Homo sapiens
  SOMA_L75I
FPTIPLSRLFDNAMLRAHRLHQLAFDTYQEFEEAYIPKEQKYSFLQNPQTSLCFSESIPTPSNREETQQKSNLEILRISLLLIQSWLEPVQFLRSVFANSLVYGASDSNVYDLLKDLEEGIQTLMGRLEDGSPRTGQIFKQTYSKFDTNSHNDDALLKNYGLLYCFRKDMDKVETFLRIVQCRSVEGSCGF

SEQ ID NO: 1352 - protein, 191 aa, Homo sapiens
  SOMA_L75V
FPTIPLSRLFDNAMLRAHRLHQLAFDTYQEFEEAYIPKEQKYSFLQNPQTSLCFSESIPTPSNREETQQKSNLEVLRISLLLIQSWLEPVQFLRSVFANSLVYGASDSNVYDLLKDLEEGIQTLMGRLEDGSPRTGQIFKQTYSKFDTNSHNDDALLKNYGLLYCFRKDMDKVETFLRIVQCRSVEGSCGF

SEQ ID NO: 1353 - protein, 191 aa, Homo sapiens
  SOMA_L76I
FPTIPLSRLFDNAMLRAHRLHQLAFDTYQEFEEAYIPKEQKYSFLQNPQTSLCFSESIPTPSNREETQQKSNLELIRISLLLIQSWLEPVQFLRSVFANSLVYGASDSNVYDLLKDLEEGIQTLMGRLEDGSPRTGQIFKQTYSKFDTNSHNDDALLKNYGLLYCFRKDMDKVETFLRIVQCRSVEGSCGF

SEQ ID NO: 1354 - protein, 191 aa, Homo sapiens
  SOMA_L76V
FPTIPLSRLFDNAMLRAHRLHQLAFDTYQEFEEAYIPKEQKYSFLQNPQTSLCFSESIPTPSNREETQQKSNLELVRISLLLIQSWLEPVQFLRSVFANSLVYGASDSNVYDLLKDLEEGIQTLMGRLEDGSPRTGQIFKQTYSKFDTNSHNDDALLKNYGLLYCFRKDMDKVETFLRIVQCRSVEGSCGF

SEQ ID NO: 1355 - protein, 191 aa, Homo sapiens
  SOMA_R77H
FPTIPLSRLFDNAMLRAHRLHQLAFDTYQEFEEAYIPKEQKYSFLQNPQTSLCFSESIPTPSNREETQQKSNLELLHISLLLIQSWLEPVQFLRSVFANSLVYGASDSNVYDLLKDLEEGIQTLMGRLEDGSPRTGQIFKQTYSKFDTNSHNDDALLKNYGLLYCFRKDMDKVETFLRIVQCRSVEGSCGF

SEQ ID NO: 1356 - protein, 191 aa, Homo sapiens
  SOMA_R77Q
FPTIPLSRLFDNAMLRAHRLHQLAFDTYQEFEEAYIPKEQKYSFLQNPQTSLCFSESIPTPSNREETQQKSNLELLQISLLLIQSWLEPVQFLRSVFANSLVYGASDSNVYDLLKDLEEGIQTLMGRLEDGSPRTGQIFKQTYSKFDTNSHNDDALLKNYGLLYCFRKDMDKVETFLRIVQCRSVEGSCGF

SEQ ID NO: 1357 - protein, 191 aa, Homo sapiens
  SOMA_L80I
FPTIPLSRLFDNAMLRAHRLHQLAFDTYQEFEEAYIPKEQKYSFLQNPQTSLCFSESIPTPSNREETQQKSNLELLRISILLIQSWLEPVQFLRSVFANSLVYGASDSNVYDLLKDLEEGIQTLMGRLEDGSPRTGQIFKQTYSKFDTNSHNDDALLKNYGLLYCFRKDMDKVETFLRIVQCRSVEGSCGF

SEQ ID NO: 1358 - protein, 191 aa, Homo sapiens
  SOMA_L80V
FPTIPLSRLFDNAMLRAHRLHQLAFDTYQEFEEAYIPKEQKYSFLQNPQTSLCFSESIPTPSNREETQQKSNLELLRISVLLIQSWLEPVQFLRSVFANSLVYGASDSNVYDLLKDLEEGIQTLMGRLEDGSPRTGQIFKQTYSKFDTNSHNDDALLKNYGLLYCFRKDMDKVETFLRIVQCRSVEGSCGF

SEQ ID NO: 1359 - protein, 191 aa, Homo sapiens
  SOMA_L81I
FPTIPLSRLFDNAMLRAHRLHQLAFDTYQEFEEAYIPKEQKYSFLQNPQTSLCFSESIPTPSNREETQQKSNLELLRISLILIQSWLEPVQFLRSVFANSLVYGASDSNVYDLLKDLEEGIQTLMGRLEDGSPRTGQIFKQTYSKFDTNSHNDDALLKNYGLLYCFRKDMDKVETFLRIVQCRSVEGSCGF

SEQ ID NO: 1360 - protein, 191 aa, Homo sapiens
  SOMA_L81V
FPTIPLSRLFDNAMLRAHRLHQLAFDTYQEFEEAYIPKEQKYSFLQNPQTSLCFSESIPTPSNREETQQKSNLELLRISLVLIQSWLEPVQFLRSVFANSLVYGASDSNVYDLLKDLEEGIQTLMGRLEDGSPRTGQIFKQTYSKFDTNSHNDDALLKNYGLLYCFRKDMDKVETFLRIVQCRSVEGSCGF

SEQ ID NO: 1361 - protein, 191 aa, Homo sapiens
  SOMA_L82I
FPTIPLSRLFDNAMLRAHRLHQLAFDTYQEFEEAYIPKEQKYSFLQNPQTSLCFSESIPTPSNREETQQKSNLELLRISLLIIQSWLEPVQFLRSVFANSLVYGASDSNVYDLLKDLEEGIQTLMGRLEDGSPRTGQIFKQTYSKFDTNSHNDDALLKNYGLLYCFRKDMDKVETFLRIVQCRSVEGSCGF

SEQ ID NO: 1362 - protein, 191 aa, Homo sapiens
  SOMA_L82V
FPTIPLSRLFDNAMLRAHRLHQLAFDTYQEFEEAYIPKEQKYSFLQNPQTSLCFSESIPTPSNREETQQKSNLELLRISLLVIQSWLEPVQFLRSVFANSLVYGASDSNVYDLLKDLEEGIQTLMGRLEDGSPRTGQIFKQTYSKFDTNSHNDDALLKNYGLLYCFRKDMDKVETFLRIVQCRSVEGSCGF

SEQ ID NO: 1363 - protein, 191 aa, Homo sapiens
  SOMA_W86S
FPTIPLSRLFDNAMLRAHRLHQLAFDTYQEFEEAYIPKEQKYSFLQNPQTSLCFSESIPTPSNREETQQKSNLELLRISLLLIQSSLEPVQFLRSVFANSLVYGASDSNVYDLLKDLEEGIQTLMGRLEDGSPRTGQIFKQTYSKFDTNSHNDDALLKNYGLLYCFRKDMDKVETFLRIVQCRSVEGSCGF

SEQ ID NO: 1364 - protein, 191 aa, Homo sapiens
  SOMA_W86H
FPTIPLSRLFDNAMLRAHRLHQLAFDTYQEFEEAYIPKEQKYSFLQNPQTSLCFSESIPTPSNREETQQKSNLELLRISLLLIQSHLEPVQFLRSVFANSLVYGASDSNVYDLLKDLEEGIQTLMGRLEDGSPRTGQIFKQTYSKFDTNSHNDDALLKNYGLLYCFRKDMDKVETFLRIVQCRSVEGSCGF

SEQ ID NO: 1365 - protein, 191 aa, Homo sapiens
  SOMA_L87I
FPTIPLSRLFDNAMLRAHRLHQLAFDTYQEFEEAYIPKEQKYSFLQNPQTSLCFSESIPTPSNREETQQKSNLELLRISLLLIQSWIEPVQFLRSVFANSLVYGASDSNVYDLLKDLEEGIQTLMGRLEDGSPRTGQIFKQTYSKFDTNSHNDDALLKNYGLLYCFRKDMDKVETFLRIVQCRSVEGSCGF

SEQ ID NO: 1366 - protein, 191 aa, Homo sapiens
  SOMA_L87V
FPTIPLSRLFDNAMLRAHRLHQLAFDTYQEFEEAYIPKEQKYSFLQNPQTSLCFSESIPTPSNREETQQKSNLELLRISLLLIQSWVEPVQFLRSVFANSLVYGASDSNVYDLLKDLEEGIQTLMGRLEDGSPRTGQIFKQTYSKFDTNSHNDDALLKNYGLLYCFRKDMDKVETFLRIVQCRSVEGSCGF

SEQ ID NO: 1367 - protein, 191 aa, Homo sapiens
  SOMA_E88N
FPTIPLSRLFDNAMLRAHRLHQLAFDTYQEFEEAYIPKEQKYSFLQNPQTSLCFSESIPTPSNREETQQKSNLELLRISLLLIQSWLNPVQFLRSVFANSLVYGASDSNVYDLLKDLEEGIQTLMGRLEDGSPRTGQIFKQTYSKFDTNSHNDDALLKNYGLLYCFRKDMDKVETFLRIVQCRSVEGSCGF

SEQ ID NO: 1368 - protein, 191 aa, Homo sapiens
  SOMA_E88Q
FPTIPLSRLFDNAMLRAHRLHQLAFDTYQEFEEAYIPKEQKYSFLQNPQTSLCFSESIPTPSNREETQQKSNLELLRISLLLIQSWLQPVQFLRSVFANSLVYGASDSNVYDLLKDLEEGIQTLMGRLEDGSPRTGQIFKQTYSKFDTNSHNDDALLKNYGLLYCFRKDMDKVETFLRIVQCRSVEGSCGF

SEQ ID NO: 1369 - protein, 191 aa, Homo sapiens
  SOMA_E88H
FPTIPLSRLFDNAMLRAHRLHQLAFDTYQEFEEAYIPKEQKYSFLQNPQTSLCFSESIPTPSNREETQQKSNLELLRISLLLIQSWLHPVQFLRSVFANSLVYGASDSNVYDLLKDLEEGIQTLMGRLEDGSPRTGQIFKQTYSKFDTNSHNDDALLKNYGLLYCFRKDMDKVETFLRIVQCRSVEGSCGF

SEQ ID NO: 1370 - protein, 191 aa, Homo sapiens
  SOMA_P89A
FPTIPLSRLFDNAMLRAHRLHQLAFDTYQEFEEAYIPKEQKYSFLQNPQTSLCFSESIPTPSNREETQQKSNLELLRISLLLIQSWLEAVQFLRSVFANSLVYGASDSNVYDLLKDLEEGIQTLMGRLEDGSPRTGQIFKQTYSKFDTNSHNDDALLKNYGLLYCFRKDMDKVETFLRIVQCRSVEGSCGF

SEQ ID NO: 1371 - protein, 191 aa, Homo sapiens
  SOMA_P89S
FPTIPLSRLFDNAMLRAHRLHQLAFDTYQEFEEAYIPKEQKYSFLQNPQTSLCFSESIPTPSNREETQQKSNLELLRISLLLIQSWLESVQFLRSVFANSLVYGASDSNVYDLLKDLEEGIQTLMGRLEDGSPRTGQIFKQTYSKFDTNSHNDDALLKNYGLLYCFRKDMDKVETFLRIVQCRSVEGSCGF

SEQ ID NO: 1372 - protein, 191 aa, Homo sapiens
  SOMA_F92I
FPTIPLSRLFDNAMLRAHRLHQLAFDTYQEFEEAYIPKEQKYSFLQNPQTSLCFSESIPTPSNREETQQKSNLELLRISLLLIQSWLEPVQILRSVFANSLVYGASDSNVYDLLKDLEEGIQTLMGRLEDGSPRTGQIFKQTYSKFDTNSHNDDALLKNYGLLYCFRKDMDKVETFLRIVQCRSVEGSCGF

SEQ ID NO: 1373 - protein, 191 aa, Homo sapiens
  SOMA_F92V
FPTIPLSRLFDNAMLRAHRLHQLAFDTYQEFEEAYIPKEQKYSFLQNPQTSLCFSESIPTPSNREETQQKSNLELLRISLLLIQSWLEPVQVLRSVFANSLVYGASDSNVYDLLKDLEEGIQTLMGRLEDGSPRTGQIFKQTYSKFDTNSHNDDALLKNYGLLYCFRKDMDKVETFLRIVQCRSVEGSCGF

SEQ ID NO: 1374 - protein, 191 aa, Homo sapiens
  SOMA_L93I
FPTIPLSRLFDNAMLRAHRLHQLAFDTYQEFEEAYIPKEQKYSFLQNPQTSLCFSESIPTPSNREETQQKSNLELLRISLLLIQSWLEPVQFIRSVFANSLVYGASDSNVYDLLKDLEEGIQTLMGRLEDGSPRTGQIFKQTYSKFDTNSHNDDALLKNYGLLYCFRKDMDKVETFLRIVQCRSVEGSCGF

SEQ ID NO: 1375 - protein, 191 aa, Homo sapiens
  SOMA_L93V
FPTIPLSRLFDNAMLRAHRLHQLAFDTYQEFEEAYIPKEQKYSFLQNPQTSLCFSESIPTPSNREETQQKSNLELLRISLLLIQSWLEPVQFVRSVFANSLVYGASDSNVYDLLKDLEEGIQTLMGRLEDGSPRTGQIFKQTYSKFDTNSHNDDALLKNYGLLYCFRKDMDKVETFLRIVQCRSVEGSCGF

SEQ ID NO: 1376 - protein, 191 aa, Homo sapiens
  SOMA_R94H
FPTIPLSRLFDNAMLRAHRLHQLAFDTYQEFEEAYIPKEQKYSFLQNPQTSLCFSESIPTPSNREETQQKSNLELLRISLLLIQSWLEPVQFLHSVFANSLVYGASDSNVYDLLKDLEEGIQTLMGRLEDGSPRTGQIFKQTYSKFDTNSHNDDALLKNYGLLYCFRKDMDKVETFLRIVQCRSVEGSCGF

SEQ ID NO: 1377 - protein, 191 aa, Homo sapiens
  SOMA_R94Q
FPTIPLSRLFDNAMLRAHRLHQLAFDTYQEFEEAYIPKEQKYSFLQNPQTSLCFSESIPTPSNREETQQKSNLELLRISLLLIQSWLEPVQFLQSVFANSLVYGASDSNVYDLLKDLEEGIQTLMGRLEDGSPRTGQIFKQTYSKFDTNSHNDDALLKNYGLLYCFRKDMDKVETFLRIVQCRSVEGSCGF

SEQ ID NO: 1378 - protein, 191 aa, Homo sapiens
  SOMA_F97I
FPTIPLSRLFDNAMLRAHRLHQLAFDTYQEFEEAYIPKEQKYSFLQNPQTSLCFSESIPTPSNREETQQKSNLELLRISLLLIQSWLEPVQFLRSVIANSLVYGASDSNVYDLLKDLEEGIQTLMGRLEDGSPRTGQIFKQTYSKFDTNSHNDDALLKNYGLLYCFRKDMDKVETFLRIVQCRSVEGSCGF

SEQ ID NO: 1379 - protein, 191 aa, Homo sapiens
  SOMA_F97V
FPTIPLSRLFDNAMLRAHRLHQLAFDTYQEFEEAYIPKEQKYSFLQNPQTSLCFSESIPTPSNREETQQKSNLELLRISLLLIQSWLEPVQFLRSVVANSLVYGASDSNVYDLLKDLEEGIQTLMGRLEDGSPRTGQIFKQTYSKFDTNSHNDDALLKNYGLLYCFRKDMDKVETFLRIVQCRSVEGSCGF

SEQ ID NO: 1380 - protein, 191 aa, Homo sapiens
  SOMA_L101I
FPTIPLSRLFDNAMLRAHRLHQLAFDTYQEFEEAYIPKEQKYSFLQNPQTSLCFSESIPTPSNREETQQKSNLELLRISLLLIQSWLEPVQFLRSVFANSIVYGASDSNVYDLLKDLEEGIQTLMGRLEDGSPRTGQIFKQTYSKFDTNSHNDDALLKNYGLLYCFRKDMDKVETFLRIVQCRSVEGSCGF

SEQ ID NO: 1381 - protein, 191 aa, Homo sapiens
  SOMA_L101V
FPTIPLSRLFDNAMLRAHRLHQLAFDTYQEFEEAYIPKEQKYSFLQNPQTSLCFSESIPTPSNREETQQKSNLELLRISLLLIQSWLEPVQFLRSVFANSVVYGASDSNVYDLLKDLEEGIQTLMGRLEDGSPRTGQIFKQTYSKFDTNSHNDDALLKNYGLLYCFRKDMDKVETFLRIVQCRSVEGSCGF

SEQ ID NO: 1382 - protein, 191 aa, Homo sapiens
  SOMA_Y103H
FPTIPLSRLFDNAMLRAHRLHQLAFDTYQEFEEAYIPKEQKYSFLQNPQTSLCFSESIPTPSNREETQQKSNLELLRISLLLIQSWLEPVQFLRSVFANSLVHGASDSNVYDLLKDLEEGIQTLMGRLEDGSPRTGQIFKQTYSKFDTNSHNDDALLKNYGLLYCFRKDMDKVETFLRIVQCRSVEGSCGF

SEQ ID NO: 1383 - protein, 191 aa, Homo sapiens
  SOMA_Y103I
FPTIPLSRLFDNAMLRAHRLHQLAFDTYQEFEEAYIPKEQKYSFLQNPQTSLCFSESIPTPSNREETQQKSNLELLRISLLLIQSWLEPVQFLRSVFANSLVIGASDSNVYDLLKDLEEGIQTLMGRLEDGSPRTGQIFKQTYSKFDTNSHNDDALLKNYGLLYCFRKDMDKVETFLRIVQCRSVEGSCGF

SEQ ID NO: 1384 - protein, 191 aa, Homo sapiens
  SOMA_D107N
FPTIPLSRLFDNAMLRAHRLHQLAFDTYQEFEEAYIPKEQKYSFLQNPQTSLCFSESIPTPSNREETQQKSNLELLRISLLLIQSWLEPVQFLRSVFANSLVYGASNSNVYDLLKDLEEGIQTLMGRLEDGSPRTGQIFKQTYSKFDTNSHNDDALLKNYGLLYCFRKDMDKVETFLRIVQCRSVEGSCGF

SEQ ID NO: 1385 - protein, 191 aa, Homo sapiens
  SOMA_D107Q
FPTIPLSRLFDNAMLRAHRLHQLAFDTYQEFEEAYIPKEQKYSFLQNPQTSLCFSESIPTPSNREETQQKSNLELLRISLLLIQSWLEPVQFLRSVFANSLVYGASQSNVYDLLKDLEEGIQTLMGRLEDGSPRTGQIFKQTYSKFDTNSHNDDALLKNYGLLYCFRKDMDKVETFLRIVQCRSVEGSCGF

SEQ ID NO: 1386 - protein, 191 aa, Homo sapiens
  SOMA_Y111H
FPTIPLSRLFDNAMLRAHRLHQLAFDTYQEFEEAYIPKEQKYSFLQNPQTSLCFSESIPTPSNREETQQKSNLELLRISLLLIQSWLEPVQFLRSVFANSLVYGASDSNVHDLLKDLEEGIQTLMGRLEDGSPRTGQIFKQTYSKFDTNSHNDDALLKNYGLLYCFRKDMDKVETFLRIVQCRSVEGSCGF

SEQ ID NO: 1387 - protein, 191 aa, Homo sapiens
  SOMA_Y111I
FPTIPLSRLFDNAMLRAHRLHQLAFDTYQEFEEAYIPKEQKYSFLQNPQTSLCFSESIPTPSNREETQQKSNLELLRISLLLIQSWLEPVQFLRSVFANSLVYGASDSNVIDLLKDLEEGIQTLMGRLEDGSPRTGQIFKQTYSKFDTNSHNDDALLKNYGLLYCFRKDMDKVETFLRIVQCRSVEGSCGF

SEQ ID NO: 1388 - protein, 191 aa, Homo sapiens
  SOMA_D112N
FPTIPLSRLFDNAMLRAHRLHQLAFDTYQEFEEAYIPKEQKYSFLQNPQTSLCFSESIPTPSNREETQQKSNLELLRISLLLIQSWLEPVQFLRSVFANSLVYGASDSNVYNLLKDLEEGIQTLMGRLEDGSPRTGQIFKQTYSKFDTNSHNDDALLKNYGLLYCFRKDMDKVETFLRIVQCRSVEGSCGF

SEQ ID NO: 1389 - protein, 191 aa, Homo sapiens
  SOMA_D112Q
FPTIPLSRLFDNAMLRAHRLHQLAFDTYQEFEEAYIPKEQKYSFLQNPQTSLCFSESIPTPSNREETQQKSNLELLRISLLLIQSWLEPVQFLRSVFANSLVYGASDSNVYQLLKDLEEGIQTLMGRLEDGSPRTGQIFKQTYSKFDTNSHNDDALLKNYGLLYCFRKDMDKVETFLRIVQCRSVEGSCGF

SEQ ID NO: 1390 - protein, 191 aa, Homo sapiens
  SOMA_L113I
FPTIPLSRLFDNAMLRAHRLHQLAFDTYQEFEEAYIPKEQKYSFLQNPQTSLCFSESIPTPSNREETQQKSNLELLRISLLLIQSWLEPVQFLRSVFANSLVYGASDSNVYDILKDLEEGIQTLMGRLEDGSPRTGQIFKQTYSKFDTNSHNDDALLKNYGLLYCFRKDMDKVETFLRIVQCRSVEGSCGF

SEQ ID NO: 1391 - protein, 191 aa, Homo sapiens
  SOMA_L113V
FPTIPLSRLFDNAMLRAHRLHQLAFDTYQEFEEAYIPKEQKYSFLQNPQTSLCFSESIPTPSNREETQQKSNLELLRISLLLIQSWLEPVQFLRSVFANSLVYGASDSNVYDVLKDLEEGIQTLMGRLEDGSPRTGQIFKQTYSKFDTNSHNDDALLKNYGLLYCFRKDMDKVETFLRIVQCRSVEGSCGF

SEQ ID NO: 1392 - protein, 191 aa, Homo sapiens
  SOMA_L114I
FPTIPLSRLFDNAMLRAHRLHQLAFDTYQEFEEAYIPKEQKYSFLQNPQTSLCFSESIPTPSNREETQQKSNLELLRISLLLIQSWLEPVQFLRSVFANSLVYGASDSNVYDLIKDLEEGIQTLMGRLEDGSPRTGQIFKQTYSKFDTNSHNDDALLKNYGLLYCFRKDMDKVETFLRIVQCRSVEGSCGF

SEQ ID NO: 1393 - protein, 191 aa, Homo sapiens
  SOMA_L114V
FPTIPLSRLFDNAMLRAHRLHQLAFDTYQEFEEAYIPKEQKYSFLQNPQTSLCFSESIPTPSNREETQQKSNLELLRISLLLIQSWLEPVQFLRSVFANSLVYGASDSNVYDLVKDLEEGIQTLMGRLEDGSPRTGQIFKQTYSKFDTNSHNDDALLKNYGLLYCFRKDMDKVETFLRIVQCRSVEGSCGF

SEQ ID NO: 1394 - protein, 191 aa, Homo sapiens
  SOMA_K115N
FPTIPLSRLFDNAMLRAHRLHQLAFDTYQEFEEAYIPKEQKYSFLQNPQTSLCFSESIPTPSNREETQQKSNLELLRISLLLIQSWLEPVQFLRSVFANSLVYGASDSNVYDLLNDLEEGIQTLMGRLEDGSPRTGQIFKQTYSKFDTNSHNDDALLKNYGLLYCFRKDMDKVETFLRIVQCRSVEGSCGF

SEQ ID NO: 1395 - protein, 191 aa, Homo sapiens
  SOMA_K115Q
FPTIPLSRLFDNAMLRAHRLHQLAFDTYQEFEEAYIPKEQKYSFLQNPQTSLCFSESIPTPSNREETQQKSNLELLRISLLLIQSWLEPVQFLRSVFANSLVYGASDSNVYDLLQDLEEGIQTLMGRLEDGSPRTGQIFKQTYSKFDTNSHNDDALLKNYGLLYCFRKDMDKVETFLRIVQCRSVEGSCGF

SEQ ID NO: 1396 - protein, 191 aa, Homo sapiens
  SOMA_D116N
FPTIPLSRLFDNAMLRAHRLHQLAFDTYQEFEEAYIPKEQKYSFLQNPQTSLCFSESIPTPSNREETQQKSNLELLRISLLLIQSWLEPVQFLRSVFANSLVYGASDSNVYDLLKNLEEGIQTLMGRLEDGSPRTGQIFKQTYSKFDTNSHNDDALLKNYGLLYCFRKDMDKVETFLRIVQCRSVEGSCGF

SEQ ID NO: 1397 - protein, 191 aa, Homo sapiens
  SOMA_D116Q
FPTIPLSRLFDNAMLRAHRLHQLAFDTYQEFEEAYIPKEQKYSFLQNPQTSLCFSESIPTPSNREETQQKSNLELLRISLLLIQSWLEPVQFLRSVFANSLVYGASDSNVYDLLKQLEEGIQTLMGRLEDGSPRTGQIFKQTYSKFDTNSHNDDALLKNYGLLYCFRKDMDKVETFLRIVQCRSVEGSCGF

SEQ ID NO: 1398 - protein, 191 aa, Homo sapiens
  SOMA_L117I
FPTIPLSRLFDNAMLRAHRLHQLAFDTYQEFEEAYIPKEQKYSFLQNPQTSLCFSESIPTPSNREETQQKSNLELLRISLLLIQSWLEPVQFLRSVFANSLVYGASDSNVYDLLKDIEEGIQTLMGRLEDGSPRTGQIFKQTYSKFDTNSHNDDALLKNYGLLYCFRKDMDKVETFLRIVQCRSVEGSCGF

SEQ ID NO: 1399 - protein, 191 aa, Homo sapiens
  SOMA_L117V
FPTIPLSRLFDNAMLRAHRLHQLAFDTYQEFEEAYIPKEQKYSFLQNPQTSLCFSESIPTPSNREETQQKSNLELLRISLLLIQSWLEPVQFLRSVFANSLVYGASDSNVYDLLKDVEEGIQTLMGRLEDGSPRTGQIFKQTYSKFDTNSHNDDALLKNYGLLYCFRKDMDKVETFLRIVQCRSVEGSCGF

SEQ ID NO: 1400 - protein, 191 aa, Homo sapiens
  SOMA_E118N
FPTIPLSRLFDNAMLRAHRLHQLAFDTYQEFEEAYIPKEQKYSFLQNPQTSLCFSESIPTPSNREETQQKSNLELLRISLLLIQSWLEPVQFLRSVFANSLVYGASDSNVYDLLKDLNEGIQTLMGRLEDGSPRTGQIFKQTYSKFDTNSHNDDALLKNYGLLYCFRKDMDKVETFLRIVQCRSVEGSCGF

SEQ ID NO: 1401 - protein, 191 aa, Homo sapiens
  SOMA_E118Q
FPTIPLSRLFDNAMLRAHRLHQLAFDTYQEFEEAYIPKEQKYSFLQNPQTSLCFSESIPTPSNREETQQKSNLELLRISLLLIQSWLEPVQFLRSVFANSLVYGASDSNVYDLLKDLQEGIQTLMGRLEDGSPRTGQIFKQTYSKFDTNSHNDDALLKNYGLLYCFRKDMDKVETFLRIVQCRSVEGSCGF

SEQ ID NO: 1402 - protein, 191 aa, Homo sapiens
  SOMA_E118H
FPTIPLSRLFDNAMLRAHRLHQLAFDTYQEFEEAYIPKEQKYSFLQNPQTSLCFSESIPTPSNREETQQKSNLELLRISLLLIQSWLEPVQFLRSVFANSLVYGASDSNVYDLLKDLHEGIQTLMGRLEDGSPRTGQIFKQTYSKFDTNSHNDDALLKNYGLLYCFRKDMDKVETFLRIVQCRSVEGSCGF

SEQ ID NO: 1403 - protein, 191 aa, Homo sapiens
  SOMA_E119N
FPTIPLSRLFDNAMLRAHRLHQLAFDTYQEFEEAYIPKEQKYSFLQNPQTSLCFSESIPTPSNREETQQKSNLELLRISLLLIQSWLEPVQFLRSVFANSLVYGASDSNVYDLLKDLENGIQTLMGRLEDGSPRTGQIFKQTYSKFDTNSHNDDALLKNYGLLYCFRKDMDKVETFLRIVQCRSVEGSCGF

SEQ ID NO: 1404 - protein, 191 aa, Homo sapiens
  SOMA_E119Q
FPTIPLSRLFDNAMLRAHRLHQLAFDTYQEFEEAYIPKEQKYSFLQNPQTSLCFSESIPTPSNREETQQKSNLELLRISLLLIQSWLEPVQFLRSVFANSLVYGASDSNVYDLLKDLEQGIQTLMGRLEDGSPRTGQIFKQTYSKFDTNSHNDDALLKNYGLLYCFRKDMDKVETFLRIVQCRSVEGSCGF

SEQ ID NO: 1405 - protein, 191 aa, Homo sapiens
  SOMA_E119H
FPTIPLSRLFDNAMLRAHRLHQLAFDTYQEFEEAYIPKEQKYSFLQNPQTSLCFSESIPTPSNREETQQKSNLELLRISLLLIQSWLEPVQFLRSVFANSLVYGASDSNVYDLLKDLEHGIQTLMGRLEDGSPRTGQIFKQTYSKFDTNSHNDDALLKNYGLLYCFRKDMDKVETFLRIVQCRSVEGSCGF

SEQ ID NO: 1406 - protein, 191 aa, Homo sapiens
  SOMA_L124I
FPTIPLSRLFDNAMLRAHRLHQLAFDTYQEFEEAYIPKEQKYSFLQNPQTSLCFSESIPTPSNREETQQKSNLELLRISLLLIQSWLEPVQFLRSVFANSLVYGASDSNVYDLLKDLEEGIQTIMGRLEDGSPRTGQIFKQTYSKFDTNSHNDDALLKNYGLLYCFRKDMDKVETFLRIVQCRSVEGSCGF

SEQ ID NO: 1407 - protein, 191 aa, Homo sapiens
  SOMA_L124V
FPTIPLSRLFDNAMLRAHRLHQLAFDTYQEFEEAYIPKEQKYSFLQNPQTSLCFSESIPTPSNREETQQKSNLELLRISLLLIQSWLEPVQFLRSVFANSLVYGASDSNVYDLLKDLEEGIQTVMGRLEDGSPRTGQIFKQTYSKFDTNSHNDDALLKNYGLLYCFRKDMDKVETFLRIVQCRSVEGSCGF

SEQ ID NO: 1408 - protein, 191 aa, Homo sapiens
  SOMA_M125I
FPTIPLSRLFDNAMLRAHRLHQLAFDTYQEFEEAYIPKEQKYSFLQNPQTSLCFSESIPTPSNREETQQKSNLELLRISLLLIQSWLEPVQFLRSVFANSLVYGASDSNVYDLLKDLEEGIQTLIGRLEDGSPRTGQIFKQTYSKFDTNSHNDDALLKNYGLLYCFRKDMDKVETFLRIVQCRSVEGSCGF

SEQ ID NO: 1409 - protein, 191 aa, Homo sapiens
  SOMA_M125V
FPTIPLSRLFDNAMLRAHRLHQLAFDTYQEFEEAYIPKEQKYSFLQNPQTSLCFSESIPTPSNREETQQKSNLELLRISLLLIQSWLEPVQFLRSVFANSLVYGASDSNVYDLLKDLEEGIQTLVGRLEDGSPRTGQIFKQTYSKFDTNSHNDDALLKNYGLLYCFRKDMDKVETFLRIVQCRSVEGSCGF

SEQ ID NO: 1410 - protein, 191 aa, Homo sapiens
  SOMA_R127H
FPTIPLSRLFDNAMLRAHRLHQLAFDTYQEFEEAYIPKEQKYSFLQNPQTSLCFSESIPTPSNREETQQKSNLELLRISLLLIQSWLEPVQFLRSVFANSLVYGASDSNVYDLLKDLEEGIQTLMGHLEDGSPRTGQIFKQTYSKFDTNSHNDDALLKNYGLLYCFRKDMDKVETFLRIVQCRSVEGSCGF

SEQ ID NO: 1411 - protein, 191 aa, Homo sapiens
  SOMA_R127Q
FPTIPLSRLFDNAMLRAHRLHQLAFDTYQEFEEAYIPKEQKYSFLQNPQTSLCFSESIPTPSNREETQQKSNLELLRISLLLIQSWLEPVQFLRSVFANSLVYGASDSNVYDLLKDLEEGIQTLMGQLEDGSPRTGQIFKQTYSKFDTNSHNDDALLKNYGLLYCFRKDMDKVETFLRIVQCRSVEGSCGF

SEQ ID NO: 1412 - protein, 191 aa, Homo sapiens
  SOMA_L128I
FPTIPLSRLFDNAMLRAHRLHQLAFDTYQEFEEAYIPKEQKYSFLQNPQTSLCFSESIPTPSNREETQQKSNLELLRISLLLIQSWLEPVQFLRSVFANSLVYGASDSNVYDLLKDLEEGIQTLMGRIEDGSPRTGQIFKQTYSKFDTNSHNDDALLKNYGLLYCFRKDMDKVETFLRIVQCRSVEGSCGF

SEQ ID NO: 1413 - protein, 191 aa, Homo sapiens
  SOMA_L128V
FPTIPLSRLFDNAMLRAHRLHQLAFDTYQEFEEAYIPKEQKYSFLQNPQTSLCFSESIPTPSNREETQQKSNLELLRISLLLIQSWLEPVQFLRSVFANSLVYGASDSNVYDLLKDLEEGIQTLMGRVEDGSPRTGQIFKQTYSKFDTNSHNDDALLKNYGLLYCFRKDMDKVETFLRIVQCRSVEGSCGF

SEQ ID NO: 1414 - protein, 191 aa, Homo sapiens
  SOMA_E129N
FPTIPLSRLFDNAMLRAHRLHQLAFDTYQEFEEAYIPKEQKYSFLQNPQTSLCFSESIPTPSNREETQQKSNLELLRISLLLIQSWLEPVQFLRSVFANSLVYGASDSNVYDLLKDLEEGIQTLMGRLNDGSPRTGQIFKQTYSKFDTNSHNDDALLKNYGLLYCFRKDMDKVETFLRIVQCRSVEGSCGF

SEQ ID NO: 1415 - protein, 191 aa, Homo sapiens
  SOMA_E129Q
FPTIPLSRLFDNAMLRAHRLHQLAFDTYQEFEEAYIPKEQKYSFLQNPQTSLCFSESIPTPSNREETQQKSNLELLRISLLLIQSWLEPVQFLRSVFANSLVYGASDSNVYDLLKDLEEGIQTLMGRLQDGSPRTGQIFKQTYSKFDTNSHNDDALLKNYGLLYCFRKDMDKVETFLRIVQCRSVEGSCGF

SEQ ID NO: 1416 - protein, 191 aa, Homo sapiens
  SOMA_E129H
FPTIPLSRLFDNAMLRAHRLHQLAFDTYQEFEEAYIPKEQKYSFLQNPQTSLCFSESIPTPSNREETQQKSNLELLRISLLLIQSWLEPVQFLRSVFANSLVYGASDSNVYDLLKDLEEGIQTLMGRLHDGSPRTGQIFKQTYSKFDTNSHNDDALLKNYGLLYCFRKDMDKVETFLRIVQCRSVEGSCGF

SEQ ID NO: 1417 - protein, 191 aa, Homo sapiens
  SOMA_D130N
FPTIPLSRLFDNAMLRAHRLHQLAFDTYQEFEEAYIPKEQKYSFLQNPQTSLCFSESIPTPSNREETQQKSNLELLRISLLLIQSWLEPVQFLRSVFANSLVYGASDSNVYDLLKDLEEGIQTLMGRLENGSPRTGQIFKQTYSKFDTNSHNDDALLKNYGLLYCFRKDMDKVETFLRIVQCRSVEGSCGF

SEQ ID NO: 1418 - protein, 191 aa, Homo sapiens
  SOMA_D130Q
FPTIPLSRLFDNAMLRAHRLHQLAFDTYQEFEEAYIPKEQKYSFLQNPQTSLCFSESIPTPSNREETQQKSNLELLRISLLLIQSWLEPVQFLRSVFANSLVYGASDSNVYDLLKDLEEGIQTLMGRLEQGSPRTGQIFKQTYSKFDTNSHNDDALLKNYGLLYCFRKDMDKVETFLRIVQCRSVEGSCGF

SEQ ID NO: 1419 - protein, 191 aa, Homo sapiens
  SOMA_P133A
FPTIPLSRLFDNAMLRAHRLHQLAFDTYQEFEEAYIPKEQKYSFLQNPQTSLCFSESIPTPSNREETQQKSNLELLRISLLLIQSWLEPVQFLRSVFANSLVYGASDSNVYDLLKDLEEGIQTLMGRLEDGSARTGQIFKQTYSKFDTNSHNDDALLKNYGLLYCFRKDMDKVETFLRIVQCRSVEGSCGF

SEQ ID NO: 1420 - protein, 191 aa, Homo sapiens
  SOMA_P133S
FPTIPLSRLFDNAMLRAHRLHQLAFDTYQEFEEAYIPKEQKYSFLQNPQTSLCFSESIPTPSNREETQQKSNLELLRISLLLIQSWLEPVQFLRSVFANSLVYGASDSNVYDLLKDLEEGIQTLMGRLEDGSSRTGQIFKQTYSKFDTNSHNDDALLKNYGLLYCFRKDMDKVETFLRIVQCRSVEGSCGF

SEQ ID NO: 1421 - protein, 191 aa, Homo sapiens
  SOMA_R134H
FPTIPLSRLFDNAMLRAHRLHQLAFDTYQEFEEAYIPKEQKYSFLQNPQTSLCFSESIPTPSNREETQQKSNLELLRISLLLIQSWLEPVQFLRSVFANSLVYGASDSNVYDLLKDLEEGIQTLMGRLEDGSPHTGQIFKQTYSKFDTNSHNDDALLKNYGLLYCFRKDMDKVETFLRIVQCRSVEGSCGF

SEQ ID NO: 1422 - protein, 191 aa, Homo sapiens
  SOMA_R134Q
FPTIPLSRLFDNAMLRAHRLHQLAFDTYQEFEEAYIPKEQKYSFLQNPQTSLCFSESIPTPSNREETQQKSNLELLRISLLLIQSWLEPVQFLRSVFANSLVYGASDSNVYDLLKDLEEGIQTLMGRLEDGSPQTGQIFKQTYSKFDTNSHNDDALLKNYGLLYCFRKDMDKVETFLRIVQCRSVEGSCGF

SEQ ID NO: 1423 - protein, 191 aa, Homo sapiens
  SOMA_F139I
FPTIPLSRLFDNAMLRAHRLHQLAFDTYQEFEEAYIPKEQKYSFLQNPQTSLCFSESIPTPSNREETQQKSNLELLRISLLLIQSWLEPVQFLRSVFANSLVYGASDSNVYDLLKDLEEGIQTLMGRLEDGSPRTGQIIKQTYSKFDTNSHNDDALLKNYGLLYCFRKDMDKVETFLRIVQCRSVEGSCGF

SEQ ID NO: 1424 - protein, 191 aa, Homo sapiens
  SOMA_F139V
FPTIPLSRLFDNAMLRAHRLHQLAFDTYQEFEEAYIPKEQKYSFLQNPQTSLCFSESIPTPSNREETQQKSNLELLRISLLLIQSWLEPVQFLRSVFANSLVYGASDSNVYDLLKDLEEGIQTLMGRLEDGSPRTGQIVKQTYSKFDTNSHNDDALLKNYGLLYCFRKDMDKVETFLRIVQCRSVEGSCGF

SEQ ID NO: 1425 - protein, 191 aa, Homo sapiens
  SOMA_K140N
FPTIPLSRLFDNAMLRAHRLHQLAFDTYQEFEEAYIPKEQKYSFLQNPQTSLCFSESIPTPSNREETQQKSNLELLRISLLLIQSWLEPVQFLRSVFANSLVYGASDSNVYDLLKDLEEGIQTLMGRLEDGSPRTGQIFNQTYSKFDTNSHNDDALLKNYGLLYCFRKDMDKVETFLRIVQCRSVEGSCGF

SEQ ID NO: 1426 - protein, 191 aa, Homo sapiens
  SOMA_K140Q
FPTIPLSRLFDNAMLRAHRLHQLAFDTYQEFEEAYIPKEQKYSFLQNPQTSLCFSESIPTPSNREETQQKSNLELLRISLLLIQSWLEPVQFLRSVFANSLVYGASDSNVYDLLKDLEEGIQTLMGRLEDGSPRTGQIFQQTYSKFDTNSHNDDALLKNYGLLYCFRKDMDKVETFLRIVQCRSVEGSCGF

SEQ ID NO: 1427 - protein, 191 aa, Homo sapiens
  SOMA_Y143H
FPTIPLSRLFDNAMLRAHRLHQLAFDTYQEFEEAYIPKEQKYSFLQNPQTSLCFSESIPTPSNREETQQKSNLELLRISLLLIQSWLEPVQFLRSVFANSLVYGASDSNVYDLLKDLEEGIQTLMGRLEDGSPRTGQIFKQTHSKFDTNSHNDDALLKNYGLLYCFRKDMDKVETFLRIVQCRSVEGSCGF

SEQ ID NO: 1428 - protein, 191 aa, Homo sapiens
  SOMA_Y143I
FPTIPLSRLFDNAMLRAHRLHQLAFDTYQEFEEAYIPKEQKYSFLQNPQTSLCFSESIPTPSNREETQQKSNLELLRISLLLIQSWLEPVQFLRSVFANSLVYGASDSNVYDLLKDLEEGIQTLMGRLEDGSPRTGQIFKQTISKFDTNSHNDDALLKNYGLLYCFRKDMDKVETFLRIVQCRSVEGSCGF

SEQ ID NO: 1429 - protein, 191 aa, Homo sapiens
  SOMA_K145N
FPTIPLSRLFDNAMLRAHRLHQLAFDTYQEFEEAYIPKEQKYSFLQNPQTSLCFSESIPTPSNREETQQKSNLELLRISLLLIQSWLEPVQFLRSVFANSLVYGASDSNVYDLLKDLEEGIQTLMGRLEDGSPRTGQIFKQTYSNFDTNSHNDDALLKNYGLLYCFRKDMDKVETFLRIVQCRSVEGSCGF

SEQ ID NO: 1430 - protein, 191 aa, Homo sapiens
  SOMA_K145Q
FPTIPLSRLFDNAMLRAHRLHQLAFDTYQEFEEAYIPKEQKYSFLQNPQTSLCFSESIPTPSNREETQQKSNLELLRISLLLIQSWLEPVQFLRSVFANSLVYGASDSNVYDLLKDLEEGIQTLMGRLEDGSPRTGQIFKQTYSQFDTNSHNDDALLKNYGLLYCFRKDMDKVETFLRIVQCRSVEGSCGF

SEQ ID NO: 1431 - protein, 191 aa, Homo sapiens
  SOMA_F146I
FPTIPLSRLFDNAMLRAHRLHQLAFDTYQEFEEAYIPKEQKYSFLQNPQTSLCFSESIPTPSNREETQQKSNLELLRISLLLIQSWLEPVQFLRSVFANSLVYGASDSNVYDLLKDLEEGIQTLMGRLEDGSPRTGQIFKQTYSKIDTNSHNDDALLKNYGLLYCFRKDMDKVETFLRIVQCRSVEGSCGF

SEQ ID NO: 1432 - protein, 191 aa, Homo sapiens
  SOMA_F146V
FPTIPLSRLFDNAMLRAHRLHQLAFDTYQEFEEAYIPKEQKYSFLQNPQTSLCFSESIPTPSNREETQQKSNLELLRISLLLIQSWLEPVQFLRSVFANSLVYGASDSNVYDLLKDLEEGIQTLMGRLEDGSPRTGQIFKQTYSKVDTNSHNDDALLKNYGLLYCFRKDMDKVETFLRIVQCRSVEGSCGF

SEQ ID NO: 1433 - protein, 191 aa, Homo sapiens
  SOMA_D147N
FPTIPLSRLFDNAMLRAHRLHQLAFDTYQEFEEAYIPKEQKYSFLQNPQTSLCFSESIPTPSNREETQQKSNLELLRISLLLIQSWLEPVQFLRSVFANSLVYGASDSNVYDLLKDLEEGIQTLMGRLEDGSPRTGQIFKQTYSKFNTNSHNDDALLKNYGLLYCFRKDMDKVETFLRIVQCRSVEGSCGF

SEQ ID NO: 1434 - protein, 191 aa, Homo sapiens
  SOMA_D147Q
FPTIPLSRLFDNAMLRAHRLHQLAFDTYQEFEEAYIPKEQKYSFLQNPQTSLCFSESIPTPSNREETQQKSNLELLRISLLLIQSWLEPVQFLRSVFANSLVYGASDSNVYDLLKDLEEGIQTLMGRLEDGSPRTGQIFKQTYSKFQTNSHNDDALLKNYGLLYCFRKDMDKVETFLRIVQCRSVEGSCGF

SEQ ID NO: 1435 - protein, 191 aa, Homo sapiens
  SOMA_D153N
FPTIPLSRLFDNAMLRAHRLHQLAFDTYQEFEEAYIPKEQKYSFLQNPQTSLCFSESIPTPSNREETQQKSNLELLRISLLLIQSWLEPVQFLRSVFANSLVYGASDSNVYDLLKDLEEGIQTLMGRLEDGSPRTGQIFKQTYSKFDTNSHNNDALLKNYGLLYCFRKDMDKVETFLRIVQCRSVEGSCGF

SEQ ID NO: 1436 - protein, 191 aa, Homo sapiens
  SOMA_D153Q
FPTIPLSRLFDNAMLRAHRLHQLAFDTYQEFEEAYIPKEQKYSFLQNPQTSLCFSESIPTPSNREETQQKSNLELLRISLLLIQSWLEPVQFLRSVFANSLVYGASDSNVYDLLKDLEEGIQTLMGRLEDGSPRTGQIFKQTYSKFDTNSHNQDALLKNYGLLYCFRKDMDKVETFLRIVQCRSVEGSCGF

SEQ ID NO: 1437 - protein, 191 aa, Homo sapiens
  SOMA_D154N
FPTIPLSRLFDNAMLRAHRLHQLAFDTYQEFEEAYIPKEQKYSFLQNPQTSLCFSESIPTPSNREETQQKSNLELLRISLLLIQSWLEPVQFLRSVFANSLVYGASDSNVYDLLKDLEEGIQTLMGRLEDGSPRTGQIFKQTYSKFDTNSHNDNALLKNYGLLYCFRKDMDKVETFLRIVQCRSVEGSCGF

SEQ ID NO: 1438 - protein, 191 aa, Homo sapiens
  SOMA_D154Q
FPTIPLSRLFDNAMLRAHRLHQLAFDTYQEFEEAYIPKEQKYSFLQNPQTSLCFSESIPTPSNREETQQKSNLELLRISLLLIQSWLEPVQFLRSVFANSLVYGASDSNVYDLLKDLEEGIQTLMGRLEDGSPRTGQIFKQTYSKFDTNSHNDQALLKNYGLLYCFRKDMDKVETFLRIVQCRSVEGSCGF

SEQ ID NO: 1439 - protein, 191 aa, Homo sapiens
  SOMA_L156I
FPTIPLSRLFDNAMLRAHRLHQLAFDTYQEFEEAYIPKEQKYSFLQNPQTSLCFSESIPTPSNREETQQKSNLELLRISLLLIQSWLEPVQFLRSVFANSLVYGASDSNVYDLLKDLEEGIQTLMGRLEDGSPRTGQIFKQTYSKFDTNSHNDDAILKNYGLLYCFRKDMDKVETFLRIVQCRSVEGSCGF

SEQ ID NO: 1440 - protein, 191 aa, Homo sapiens
  SOMA_L156V
FPTIPLSRLFDNAMLRAHRLHQLAFDTYQEFEEAYIPKEQKYSFLQNPQTSLCFSESIPTPSNREETQQKSNLELLRISLLLIQSWLEPVQFLRSVFANSLVYGASDSNVYDLLKDLEEGIQTLMGRLEDGSPRTGQIFKQTYSKFDTNSHNDDAVLKNYGLLYCFRKDMDKVETFLRIVQCRSVEGSCGF

SEQ ID NO: 1441 - protein, 191 aa, Homo sapiens
  SOMA_L157I
FPTIPLSRLFDNAMLRAHRLHQLAFDTYQEFEEAYIPKEQKYSFLQNPQTSLCFSESIPTPSNREETQQKSNLELLRISLLLIQSWLEPVQFLRSVFANSLVYGASDSNVYDLLKDLEEGIQTLMGRLEDGSPRTGQIFKQTYSKFDTNSHNDDALIKNYGLLYCFRKDMDKVETFLRIVQCRSVEGSCGF

SEQ ID NO: 1442 - protein, 191 aa, Homo sapiens
  SOMA_L157V
FPTIPLSRLFDNAMLRAHRLHQLAFDTYQEFEEAYIPKEQKYSFLQNPQTSLCFSESIPTPSNREETQQKSNLELLRISLLLIQSWLEPVQFLRSVFANSLVYGASDSNVYDLLKDLEEGIQTLMGRLEDGSPRTGQIFKQTYSKFDTNSHNDDALVKNYGLLYCFRKDMDKVETFLRIVQCRSVEGSCGF

SEQ ID NO: 1443 - protein, 191 aa, Homo sapiens
  SOMA_K158N
FPTIPLSRLFDNAMLRAHRLHQLAFDTYQEFEEAYIPKEQKYSFLQNPQTSLCFSESIPTPSNREETQQKSNLELLRISLLLIQSWLEPVQFLRSVFANSLVYGASDSNVYDLLKDLEEGIQTLMGRLEDGSPRTGQIFKQTYSKFDTNSHNDDALLNNYGLLYCFRKDMDKVETFLRIVQCRSVEGSCGF

SEQ ID NO: 1444 - protein, 191 aa, Homo sapiens
  SOMA_K158Q
FPTIPLSRLFDNAMLRAHRLHQLAFDTYQEFEEAYIPKEQKYSFLQNPQTSLCFSESIPTPSNREETQQKSNLELLRISLLLIQSWLEPVQFLRSVFANSLVYGASDSNVYDLLKDLEEGIQTLMGRLEDGSPRTGQIFKQTYSKFDTNSHNDDALLQNYGLLYCFRKDMDKVETFLRIVQCRSVEGSCGF

SEQ ID NO: 1445 - protein, 191 aa, Homo sapiens
  SOMA_Y160H
FPTIPLSRLFDNAMLRAHRLHQLAFDTYQEFEEAYIPKEQKYSFLQNPQTSLCFSESIPTPSNREETQQKSNLELLRISLLLIQSWLEPVQFLRSVFANSLVYGASDSNVYDLLKDLEEGIQTLMGRLEDGSPRTGQIFKQTYSKFDTNSHNDDALLKNHGLLYCFRKDMDKVETFLRIVQCRSVEGSCGF

SEQ ID NO: 1446 - protein, 191 aa, Homo sapiens
  SOMA_Y160I
FPTIPLSRLFDNAMLRAHRLHQLAFDTYQEFEEAYIPKEQKYSFLQNPQTSLCFSESIPTPSNREETQQKSNLELLRISLLLIQSWLEPVQFLRSVFANSLVYGASDSNVYDLLKDLEEGIQTLMGRLEDGSPRTGQIFKQTYSKFDTNSHNDDALLKNIGLLYCFRKDMDKVETFLRIVQCRSVEGSCGF

SEQ ID NO: 1447 - protein, 191 aa, Homo sapiens
  SOMA_L162I
FPTIPLSRLFDNAMLRAHRLHQLAFDTYQEFEEAYIPKEQKYSFLQNPQTSLCFSESIPTPSNREETQQKSNLELLRISLLLIQSWLEPVQFLRSVFANSLVYGASDSNVYDLLKDLEEGIQTLMGRLEDGSPRTGQIFKQTYSKFDTNSHNDDALLKNYGILYCFRKDMDKVETFLRIVQCRSVEGSCGF

SEQ ID NO: 1448 - protein, 191 aa, Homo sapiens
  SOMA_L162V
FPTIPLSRLFDNAMLRAHRLHQLAFDTYQEFEEAYIPKEQKYSFLQNPQTSLCFSESIPTPSNREETQQKSNLELLRISLLLIQSWLEPVQFLRSVFANSLVYGASDSNVYDLLKDLEEGIQTLMGRLEDGSPRTGQIFKQTYSKFDTNSHNDDALLKNYGVLYCFRKDMDKVETFLRIVQCRSVEGSCGF

SEQ ID NO: 1449 - protein, 191 aa, Homo sapiens
  SOMA_L163I
FPTIPLSRLFDNAMLRAHRLHQLAFDTYQEFEEAYIPKEQKYSFLQNPQTSLCFSESIPTPSNREETQQKSNLELLRISLLLIQSWLEPVQFLRSVFANSLVYGASDSNVYDLLKDLEEGIQTLMGRLEDGSPRTGQIFKQTYSKFDTNSHNDDALLKNYGLIYCFRKDMDKVETFLRIVQCRSVEGSCGF

SEQ ID NO: 1450 - protein, 191 aa, Homo sapiens
  SOMA_L163V
FPTIPLSRLFDNAMLRAHRLHQLAFDTYQEFEEAYIPKEQKYSFLQNPQTSLCFSESIPTPSNREETQQKSNLELLRISLLLIQSWLEPVQFLRSVFANSLVYGASDSNVYDLLKDLEEGIQTLMGRLEDGSPRTGQIFKQTYSKFDTNSHNDDALLKNYGLVYCFRKDMDKVETFLRIVQCRSVEGSCGF

SEQ ID NO: 1451 - protein, 191 aa, Homo sapiens
  SOMA_Y164H
FPTIPLSRLFDNAMLRAHRLHQLAFDTYQEFEEAYIPKEQKYSFLQNPQTSLCFSESIPTPSNREETQQKSNLELLRISLLLIQSWLEPVQFLRSVFANSLVYGASDSNVYDLLKDLEEGIQTLMGRLEDGSPRTGQIFKQTYSKFDTNSHNDDALLKNYGLLHCFRKDMDKVETFLRIVQCRSVEGSCGF

SEQ ID NO: 1452 - protein, 191 aa, Homo sapiens
  SOMA_Y164I
FPTIPLSRLFDNAMLRAHRLHQLAFDTYQEFEEAYIPKEQKYSFLQNPQTSLCFSESIPTPSNREETQQKSNLELLRISLLLIQSWLEPVQFLRSVFANSLVYGASDSNVYDLLKDLEEGIQTLMGRLEDGSPRTGQIFKQTYSKFDTNSHNDDALLKNYGLLICFRKDMDKVETFLRIVQCRSVEGSCGF

SEQ ID NO: 1453 - protein, 191 aa, Homo sapiens
  SOMA_F166I
FPTIPLSRLFDNAMLRAHRLHQLAFDTYQEFEEAYIPKEQKYSFLQNPQTSLCFSESIPTPSNREETQQKSNLELLRISLLLIQSWLEPVQFLRSVFANSLVYGASDSNVYDLLKDLEEGIQTLMGRLEDGSPRTGQIFKQTYSKFDTNSHNDDALLKNYGLLYCIRKDMDKVETFLRIVQCRSVEGSCGF

SEQ ID NO: 1454 - protein, 191 aa, Homo sapiens
  SOMA_F166V
FPTIPLSRLFDNAMLRAHRLHQLAFDTYQEFEEAYIPKEQKYSFLQNPQTSLCFSESIPTPSNREETQQKSNLELLRISLLLIQSWLEPVQFLRSVFANSLVYGASDSNVYDLLKDLEEGIQTLMGRLEDGSPRTGQIFKQTYSKFDTNSHNDDALLKNYGLLYCVRKDMDKVETFLRIVQCRSVEGSCGF

SEQ ID NO: 1455 - protein, 191 aa, Homo sapiens
  SOMA_R167H
FPTIPLSRLFDNAMLRAHRLHQLAFDTYQEFEEAYIPKEQKYSFLQNPQTSLCFSESIPTPSNREETQQKSNLELLRISLLLIQSWLEPVQFLRSVFANSLVYGASDSNVYDLLKDLEEGIQTLMGRLEDGSPRTGQIFKQTYSKFDTNSHNDDALLKNYGLLYCFHKDMDKVETFLRIVQCRSVEGSCGF

SEQ ID NO: 1456 - protein, 191 aa, Homo sapiens
  SOMA_R167Q
FPTIPLSRLFDNAMLRAHRLHQLAFDTYQEFEEAYIPKEQKYSFLQNPQTSLCFSESIPTPSNREETQQKSNLELLRISLLLIQSWLEPVQFLRSVFANSLVYGASDSNVYDLLKDLEEGIQTLMGRLEDGSPRTGQIFKQTYSKFDTNSHNDDALLKNYGLLYCFQKDMDKVETFLRIVQCRSVEGSCGF

SEQ ID NO: 1457 - protein, 191 aa, Homo sapiens
  SOMA_K168N
FPTIPLSRLFDNAMLRAHRLHQLAFDTYQEFEEAYIPKEQKYSFLQNPQTSLCFSESIPTPSNREETQQKSNLELLRISLLLIQSWLEPVQFLRSVFANSLVYGASDSNVYDLLKDLEEGIQTLMGRLEDGSPRTGQIFKQTYSKFDTNSHNDDALLKNYGLLYCFRNDMDKVETFLRIVQCRSVEGSCGF

SEQ ID NO: 1458 - protein, 191 aa, Homo sapiens
  SOMA_K168Q
FPTIPLSRLFDNAMLRAHRLHQLAFDTYQEFEEAYIPKEQKYSFLQNPQTSLCFSESIPTPSNREETQQKSNLELLRISLLLIQSWLEPVQFLRSVFANSLVYGASDSNVYDLLKDLEEGIQTLMGRLEDGSPRTGQIFKQTYSKFDTNSHNDDALLKNYGLLYCFRQDMDKVETFLRIVQCRSVEGSCGF

SEQ ID NO: 1459 - protein, 191 aa, Homo sapiens
  SOMA_D169N
FPTIPLSRLFDNAMLRAHRLHQLAFDTYQEFEEAYIPKEQKYSFLQNPQTSLCFSESIPTPSNREETQQKSNLELLRISLLLIQSWLEPVQFLRSVFANSLVYGASDSNVYDLLKDLEEGIQTLMGRLEDGSPRTGQIFKQTYSKFDTNSHNDDALLKNYGLLYCFRKNMDKVETFLRIVQCRSVEGSCGF

SEQ ID NO: 1460 - protein, 191 aa, Homo sapiens
  SOMA_D169Q
FPTIPLSRLFDNAMLRAHRLHQLAFDTYQEFEEAYIPKEQKYSFLQNPQTSLCFSESIPTPSNREETQQKSNLELLRISLLLIQSWLEPVQFLRSVFANSLVYGASDSNVYDLLKDLEEGIQTLMGRLEDGSPRTGQIFKQTYSKFDTNSHNDDALLKNYGLLYCFRKQMDKVETFLRIVQCRSVEGSCGF

SEQ ID NO: 1461 - protein, 191 aa, Homo sapiens
  SOMA_M170I
FPTIPLSRLFDNAMLRAHRLHQLAFDTYQEFEEAYIPKEQKYSFLQNPQTSLCFSESIPTPSNREETQQKSNLELLRISLLLIQSWLEPVQFLRSVFANSLVYGASDSNVYDLLKDLEEGIQTLMGRLEDGSPRTGQIFKQTYSKFDTNSHNDDALLKNYGLLYCFRKDIDKVETFLRIVQCRSVEGSCGF

SEQ ID NO: 1462 - protein, 191 aa, Homo sapiens
  SOMA_M170V
FPTIPLSRLFDNAMLRAHRLHQLAFDTYQEFEEAYIPKEQKYSFLQNPQTSLCFSESIPTPSNREETQQKSNLELLRISLLLIQSWLEPVQFLRSVFANSLVYGASDSNVYDLLKDLEEGIQTLMGRLEDGSPRTGQIFKQTYSKFDTNSHNDDALLKNYGLLYCFRKDVDKVETFLRIVQCRSVEGSCGF

SEQ ID NO: 1463 - protein, 191 aa, Homo sapiens
  SOMA_D171N
FPTIPLSRLFDNAMLRAHRLHQLAFDTYQEFEEAYIPKEQKYSFLQNPQTSLCFSESIPTPSNREETQQKSNLELLRISLLLIQSWLEPVQFLRSVFANSLVYGASDSNVYDLLKDLEEGIQTLMGRLEDGSPRTGQIFKQTYSKFDTNSHNDDALLKNYGLLYCFRKDMNKVETFLRIVQCRSVEGSCGF

SEQ ID NO: 1464 - protein, 191 aa, Homo sapiens
  SOMA_D171Q
FPTIPLSRLFDNAMLRAHRLHQLAFDTYQEFEEAYIPKEQKYSFLQNPQTSLCFSESIPTPSNREETQQKSNLELLRISLLLIQSWLEPVQFLRSVFANSLVYGASDSNVYDLLKDLEEGIQTLMGRLEDGSPRTGQIFKQTYSKFDTNSHNDDALLKNYGLLYCFRKDMQKVETFLRIVQCRSVEGSCGF

SEQ ID NO: 1465 - protein, 191 aa, Homo sapiens
  SOMA_K172N
FPTIPLSRLFDNAMLRAHRLHQLAFDTYQEFEEAYIPKEQKYSFLQNPQTSLCFSESIPTPSNREETQQKSNLELLRISLLLIQSWLEPVQFLRSVFANSLVYGASDSNVYDLLKDLEEGIQTLMGRLEDGSPRTGQIFKQTYSKFDTNSHNDDALLKNYGLLYCFRKDMDNVETFLRIVQCRSVEGSCGF

SEQ ID NO: 1466 - protein, 191 aa, Homo sapiens
  SOMA_K172Q
FPTIPLSRLFDNAMLRAHRLHQLAFDTYQEFEEAYIPKEQKYSFLQNPQTSLCFSESIPTPSNREETQQKSNLELLRISLLLIQSWLEPVQFLRSVFANSLVYGASDSNVYDLLKDLEEGIQTLMGRLEDGSPRTGQIFKQTYSKFDTNSHNDDALLKNYGLLYCFRKDMDQVETFLRIVQCRSVEGSCGF

SEQ ID NO: 1467 - protein, 191 aa, Homo sapiens
  SOMA_E174N
FPTIPLSRLFDNAMLRAHRLHQLAFDTYQEFEEAYIPKEQKYSFLQNPQTSLCFSESIPTPSNREETQQKSNLELLRISLLLIQSWLEPVQFLRSVFANSLVYGASDSNVYDLLKDLEEGIQTLMGRLEDGSPRTGQIFKQTYSKFDTNSHNDDALLKNYGLLYCFRKDMDKVNTFLRIVQCRSVEGSCGF

SEQ ID NO: 1468 - protein, 191 aa, Homo sapiens
  SOMA_E174Q
FPTIPLSRLFDNAMLRAHRLHQLAFDTYQEFEEAYIPKEQKYSFLQNPQTSLCFSESIPTPSNREETQQKSNLELLRISLLLIQSWLEPVQFLRSVFANSLVYGASDSNVYDLLKDLEEGIQTLMGRLEDGSPRTGQIFKQTYSKFDTNSHNDDALLKNYGLLYCFRKDMDKVQTFLRIVQCRSVEGSCGF

SEQ ID NO: 1469 - protein, 191 aa, Homo sapiens
  SOMA_E174H
FPTIPLSRLFDNAMLRAHRLHQLAFDTYQEFEEAYIPKEQKYSFLQNPQTSLCFSESIPTPSNREETQQKSNLELLRISLLLIQSWLEPVQFLRSVFANSLVYGASDSNVYDLLKDLEEGIQTLMGRLEDGSPRTGQIFKQTYSKFDTNSHNDDALLKNYGLLYCFRKDMDKVHTFLRIVQCRSVEGSCGF

SEQ ID NO: 1470 - protein, 191 aa, Homo sapiens
  SOMA_F176I
FPTIPLSRLFDNAMLRAHRLHQLAFDTYQEFEEAYIPKEQKYSFLQNPQTSLCFSESIPTPSNREETQQKSNLELLRISLLLIQSWLEPVQFLRSVFANSLVYGASDSNVYDLLKDLEEGIQTLMGRLEDGSPRTGQIFKQTYSKFDTNSHNDDALLKNYGLLYCFRKDMDKVETILRIVQCRSVEGSCGF

SEQ ID NO: 1471 - protein, 191 aa, Homo sapiens
  SOMA_F176V
FPTIPLSRLFDNAMLRAHRLHQLAFDTYQEFEEAYIPKEQKYSFLQNPQTSLCFSESIPTPSNREETQQKSNLELLRISLLLIQSWLEPVQFLRSVFANSLVYGASDSNVYDLLKDLEEGIQTLMGRLEDGSPRTGQIFKQTYSKFDTNSHNDDALLKNYGLLYCFRKDMDKVETVLRIVQCRSVEGSCGF

SEQ ID NO: 1472 - protein, 191 aa, Homo sapiens
  SOMA_L177I
FPTIPLSRLFDNAMLRAHRLHQLAFDTYQEFEEAYIPKEQKYSFLQNPQTSLCFSESIPTPSNREETQQKSNLELLRISLLLIQSWLEPVQFLRSVFANSLVYGASDSNVYDLLKDLEEGIQTLMGRLEDGSPRTGQIFKQTYSKFDTNSHNDDALLKNYGLLYCFRKDMDKVETFIRIVQCRSVEGSCGF

SEQ ID NO: 1473 - protein, 191 aa, Homo sapiens
  SOMA_L177V
FPTIPLSRLFDNAMLRAHRLHQLAFDTYQEFEEAYIPKEQKYSFLQNPQTSLCFSESIPTPSNREETQQKSNLELLRISLLLIQSWLEPVQFLRSVFANSLVYGASDSNVYDLLKDLEEGIQTLMGRLEDGSPRTGQIFKQTYSKFDTNSHNDDALLKNYGLLYCFRKDMDKVETFVRIVQCRSVEGSCGF

SEQ ID NO: 1474 - protein, 191 aa, Homo sapiens
  SOMA_R178H
FPTIPLSRLFDNAMLRAHRLHQLAFDTYQEFEEAYIPKEQKYSFLQNPQTSLCFSESIPTPSNREETQQKSNLELLRISLLLIQSWLEPVQFLRSVFANSLVYGASDSNVYDLLKDLEEGIQTLMGRLEDGSPRTGQIFKQTYSKFDTNSHNDDALLKNYGLLYCFRKDMDKVETFLHIVQCRSVEGSCGF

SEQ ID NO: 1475 - protein, 191 aa, Homo sapiens
  SOMA_R178Q
FPTIPLSRLFDNAMLRAHRLHQLAFDTYQEFEEAYIPKEQKYSFLQNPQTSLCFSESIPTPSNREETQQKSNLELLRISLLLIQSWLEPVQFLRSVFANSLVYGASDSNVYDLLKDLEEGIQTLMGRLEDGSPRTGQIFKQTYSKFDTNSHNDDALLKNYGLLYCFRKDMDKVETFLQIVQCRSVEGSCGF

SEQ ID NO: 1476 - protein, 191 aa, Homo sapiens
  SOMA_R183H
FPTIPLSRLFDNAMLRAHRLHQLAFDTYQEFEEAYIPKEQKYSFLQNPQTSLCFSESIPTPSNREETQQKSNLELLRISLLLIQSWLEPVQFLRSVFANSLVYGASDSNVYDLLKDLEEGIQTLMGRLEDGSPRTGQIFKQTYSKFDTNSHNDDALLKNYGLLYCFRKDMDKVETFLRIVQCHSVEGSCGF

SEQ ID NO: 1477 - protein, 191 aa, Homo sapiens
  SOMA_R183Q
FPTIPLSRLFDNAMLRAHRLHQLAFDTYQEFEEAYIPKEQKYSFLQNPQTSLCFSESIPTPSNREETQQKSNLELLRISLLLIQSWLEPVQFLRSVFANSLVYGASDSNVYDLLKDLEEGIQTLMGRLEDGSPRTGQIFKQTYSKFDTNSHNDDALLKNYGLLYCFRKDMDKVETFLRIVQCQSVEGSCGF

SEQ ID NO: 1478 - protein, 191 aa, Homo sapiens
  SOMA_E186N
FPTIPLSRLFDNAMLRAHRLHQLAFDTYQEFEEAYIPKEQKYSFLQNPQTSLCFSESIPTPSNREETQQKSNLELLRISLLLIQSWLEPVQFLRSVFANSLVYGASDSNVYDLLKDLEEGIQTLMGRLEDGSPRTGQIFKQTYSKFDTNSHNDDALLKNYGLLYCFRKDMDKVETFLRIVQCRSVNGSCGF

SEQ ID NO: 1479 - protein, 191 aa, Homo sapiens
  SOMA_E186Q
FPTIPLSRLFDNAMLRAHRLHQLAFDTYQEFEEAYIPKEQKYSFLQNPQTSLCFSESIPTPSNREETQQKSNLELLRISLLLIQSWLEPVQFLRSVFANSLVYGASDSNVYDLLKDLEEGIQTLMGRLEDGSPRTGQIFKQTYSKFDTNSHNDDALLKNYGLLYCFRKDMDKVETFLRIVQCRSVQGSCGF

SEQ ID NO: 1480 - protein, 191 aa, Homo sapiens
  SOMA_E186H
FPTIPLSRLFDNAMLRAHRLHQLAFDTYQEFEEAYIPKEQKYSFLQNPQTSLCFSESIPTPSNREETQQKSNLELLRISLLLIQSWLEPVQFLRSVFANSLVYGASDSNVYDLLKDLEEGIQTLMGRLEDGSPRTGQIFKQTYSKFDTNSHNDDALLKNYGLLYCFRKDMDKVETFLRIVQCRSVHGSCGF

SEQ ID NO: 1481 - protein, 191 aa, Homo sapiens
  SOMA_F191I
FPTIPLSRLFDNAMLRAHRLHQLAFDTYQEFEEAYIPKEQKYSFLQNPQTSLCFSESIPTPSNREETQQKSNLELLRISLLLIQSWLEPVQFLRSVFANSLVYGASDSNVYDLLKDLEEGIQTLMGRLEDGSPRTGQIFKQTYSKFDTNSHNDDALLKNYGLLYCFRKDMDKVETFLRIVQCRSVEGSCGI

SEQ ID NO: 1482 - protein, 191 aa, Homo sapiens
  SOMA_F191V
FPTIPLSRLFDNAMLRAHRLHQLAFDTYQEFEEAYIPKEQKYSFLQNPQTSLCFSESIPTPSNREETQQKSNLELLRISLLLIQSWLEPVQFLRSVFANSLVYGASDSNVYDLLKDLEEGIQTLMGRLEDGSPRTGQIFKQTYSKFDTNSHNDDALLKNYGLLYCFRKDMDKVETFLRIVQCRSVEGSCGV

SEQ ID NO: 1483 - protein, 166 aa, Homo sapiens
  EPO_P2S
ASPRLICDSRVLERYLLEAKEAENITTGCAEHCSLNENITVPDTKVNFYAWKRMEVGQQAVEVWQGLALLSEAVLRGQALLVNSSQPWEPLQLHVDKAVSGLRSLTTLLRALGAQKEAISPPDAASAAPLRTITADTFRKLFRVYSNFLRGKLKLYTGEACRTGDR

SEQ ID NO: 1484 - protein, 166 aa, Homo sapiens
  EPO_P2A
AAPRLICDSRVLERYLLEAKEAENITTGCAEHCSLNENITVPDTKVNFYAWKRMEVGQQAVEVWQGLALLSEAVLRGQALLVNSSQPWEPLQLHVDKAVSGLRSLTTLLRALGAQKEAISPPDAASAAPLRTITADTFRKLFRVYSNFLRGKLKLYTGEACRTGDR

SEQ ID NO: 1485 - protein, 166 aa, Homo sapiens
  EPO_P3S
APSRLICDSRVLERYLLEAKEAENITTGCAEHCSLNENITVPDTKVNFYAWKRMEVGQQAVEVWQGLALLSEAVLRGQALLVNSSQPWEPLQLHVDKAVSGLRSLTTLLRALGAQKEAISPPDAASAAPLRTITADTFRKLFRVYSNFLRGKLKLYTGEACRTGDR

SEQ ID NO: 1486 - protein, 166 aa, Homo sapiens
  EPO_P3A
APARLICDSRVLERYLLEAKEAENITTGCAEHCSLNENITVPDTKVNFYAWKRMEVGQQAVEVWQGLALLSEAVLRGQALLVNSSQPWEPLQLHVDKAVSGLRSLTTLLRALGAQKEAISPPDAASAAPLRTITADTFRKLFRVYSNFLRGKLKLYTGEACRTGDR

SEQ ID NO: 1487 - protein, 166 aa, Homo sapiens
  EPO_R4H
APPHLICDSRVLERYLLEAKEAENITTGCAEHCSLNENITVPDTKVNFYAWKRMEVGQQAVEVWQGLALLSEAVLRGQALLVNSSQPWEPLQLHVDKAVSGLRSLTTLLRALGAQKEAISPPDAASAAPLRTITADTFRKLFRVYSNFLRGKLKLYTGEACRTGDR

SEQ ID NO: 1488 - protein, 166 aa, Homo sapiens
  EPO_R4Q
APPQLICDSRVLERYLLEAKEAENITTGCAEHCSLNENITVPDTKVNFYAWKRMEVGQQAVEVWQGLALLSEAVLRGQALLVNSSQPWEPLQLHVDKAVSGLRSLTTLLRALGAQKEAISPPDAASAAPLRTITADTFRKLFRVYSNFLRGKLKLYTGEACRTGDR

SEQ ID NO: 1489 - protein, 166 aa, Homo sapiens
  EPO_L5I
APPRIICDSRVLERYLLEAKEAENITTGCAEHCSLNENITVPDTKVNFYAWKRMEVGQQAVEVWQGLALLSEAVLRGQALLVNSSQPWEPLQLHVDKAVSGLRSLTTLLRALGAQKEAISPPDAASAAPLRTITADTFRKLFRVYSNFLRGKLKLYTGEACRTGDR

SEQ ID NO: 1490 - protein, 166 aa, Homo sapiens
  EPO_L5V
APPRVICDSRVLERYLLEAKEAENITTGCAEHCSLNENITVPDTKVNFYAWKRMEVGQQAVEVWQGLALLSEAVLRGQALLVNSSQPWEPLQLHVDKAVSGLRSLTTLLRALGAQKEAISPPDAASAAPLRTITADTFRKLFRVYSNFLRGKLKLYTGEACRTGDR

SEQ ID NO: 1491 - protein, 166 aa, Homo sapiens
  EPO_C7S
APPRLISDSRVLERYLLEAKEAENITTGCAEHCSLNENITVPDTKVNFYAWKRMEVGQQAVEVWQGLALLSEAVLRGQALLVNSSQPWEPLQLHVDKAVSGLRSLTTLLRALGAQKEAISPPDAASAAPLRTITADTFRKLFRVYSNFLRGKLKLYTGEACRTGDR

SEQ ID NO: 1492 - protein, 166 aa, Homo sapiens
  EPO_C7V
APPRLIVDSRVLERYLLEAKEAENITTGCAEHCSLNENITVPDTKVNFYAWKRMEVGQQAVEVWQGLALLSEAVLRGQALLVNSSQPWEPLQLHVDKAVSGLRSLTTLLRALGAQKEAISPPDAASAAPLRTITADTFRKLFRVYSNFLRGKLKLYTGEACRTGDR

SEQ ID NO: 1493 - protein, 166 aa, Homo sapiens
  EPO_C7A
APPRLIADSRVLERYLLEAKEAENITTGCAEHCSLNENITVPDTKVNFYAWKRMEVGQQAVEVWQGLALLSEAVLRGQALLVNSSQPWEPLQLHVDKAVSGLRSLTTLLRALGAQKEAISPPDAASAAPLRTITADTFRKLFRVYSNFLRGKLKLYTGEACRTGDR

SEQ ID NO: 1494 - protein, 166 aa, Homo sapiens
  EPO_C7I
APPRLIIDSRVLERYLLEAKEAENITTGCAEHCSLNENITVPDTKVNFYAWKRMEVGQQAVEVWQGLALLSEAVLRGQALLVNSSQPWEPLQLHVDKAVSGLRSLTTLLRALGAQKEAISPPDAASAAPLRTITADTFRKLFRVYSNFLRGKLKLYTGEACRTGDR

SEQ ID NO: 1495 - protein, 166 aa, Homo sapiens
  EPO_C7T
APPRLITDSRVLERYLLEAKEAENITTGCAEHCSLNENITVPDTKVNFYAWKRMEVGQQAVEVWQGLALLSEAVLRGQALLVNSSQPWEPLQLHVDKAVSGLRSLTTLLRALGAQKEAISPPDAASAAPLRTITADTFRKLFRVYSNFLRGKLKLYTGEACRTGDR

SEQ ID NO: 1496 - protein, 166 aa, Homo sapiens
  EPO_D8Q
APPRLICQSRVLERYLLEAKEAENITTGCAEHCSLNENITVPDTKVNFYAWKRMEVGQQAVEVWQGLALLSEAVLRGQALLVNSSQPWEPLQLHVDKAVSGLRSLTTLLRALGAQKEAISPPDAASAAPLRTITADTFRKLFRVYSNFLRGKLKLYTGEACRTGDR

SEQ ID NO: 1497 - protein, 166 aa, Homo sapiens
  EPO_D8H
APPRLICHSRVLERYLLEAKEAENITTGCAEHCSLNENITVPDTKVNFYAWKRMEVGQQAVEVWQGLALLSEAVLRGQALLVNSSQPWEPLQLHVDKAVSGLRSLTTLLRALGAQKEAISPPDAASAAPLRTITADTFRKLFRVYSNFLRGKLKLYTGEACRTGDR

SEQ ID NO: 1498 - protein, 166 aa, Homo sapiens
  EPO_D8N
APPRLICNSRVLERYLLEAKEAENITTGCAEHCSLNENITVPDTKVNFYAWKRMEVGQQAVEVWQGLALLSEAVLRGQALLVNSSQPWEPLQLHVDKAVSGLRSLTTLLRALGAQKEAISPPDAASAAPLRTITADTFRKLFRVYSNFLRGKLKLYTGEACRTGDR

SEQ ID NO: 1499 - protein, 166 aa, Homo sapiens
  EPO_R10H
APPRLICDSHVLERYLLEAKEAENITTGCAEHCSLNENITVPDTKVNFYAWKRMEVGQQAVEVWQGLALLSEAVLRGQALLVNSSQPWEPLQLHVDKAVSGLRSLTTLLRALGAQKEAISPPDAASAAPLRTITADTFRKLFRVYSNFLRGKLKLYTGEACRTGDR

SEQ ID NO: 1500 - protein, 166 aa, Homo sapiens
  EPO_R10Q
APPRLICDSQVLERYLLEAKEAENITTGCAEHCSLNENITVPDTKVNFYAWKRMEVGQQAVEVWQGLALLSEAVLRGQALLVNSSQPWEPLQLHVDKAVSGLRSLTTLLRALGAQKEAISPPDAASAAPLRTITADTFRKLFRVYSNFLRGKLKLYTGEACRTGDR

SEQ ID NO: 1501 - protein, 166 aa, Homo sapiens
  EPO_L12V
APPRLICDSRVVERYLLEAKEAENITTGCAEHCSLNENITVPDTKVNFYAWKRMEVGQQAVEVWQGLALLSEAVLRGQALLVNSSQPWEPLQLHVDKAVSGLRSLTTLLRALGAQKEAISPPDAASAAPLRTITADTFRKLFRVYSNFLRGKLKLYTGEACRTGDR

SEQ ID NO: 1502 - protein, 166 aa, Homo sapiens
  EPO_L12I
APPRLICDSRVIERYLLEAKEAENITTGCAEHCSLNENITVPDTKVNFYAWKRMEVGQQAVEVWQGLALLSEAVLRGQALLVNSSQPWEPLQLHVDKAVSGLRSLTTLLRALGAQKEAISPPDAASAAPLRTITADTFRKLFRVYSNFLRGKLKLYTGEACRTGDR

SEQ ID NO: 1503 - protein, 166 aa, Homo sapiens
  EPO_E13Q
APPRLICDSRVLQRYLLEAKEAENITTGCAEHCSLNENITVPDTKVNFYAWKRMEVGQQAVEVWQGLALLSEAVLRGQALLVNSSQPWEPLQLHVDKAVSGLRSLTTLLRALGAQKEAISPPDAASAAPLRTITADTFRKLFRVYSNFLRGKLKLYTGEACRTGDR

SEQ ID NO: 1504 - protein, 166 aa, Homo sapiens
  EPO_E13H
APPRLICDSRVLHRYLLEAKEAENITTGCAEHCSLNENITVPDTKVNFYAWKRMEVGQQAVEVWQGLALLSEAVLRGQALLVNSSQPWEPLQLHVDKAVSGLRSLTTLLRALGAQKEAISPPDAASAAPLRTITADTFRKLFRVYSNFLRGKLKLYTGEACRTGDR

SEQ ID NO: 1505 - protein, 166 aa, Homo sapiens
  EPO_E13N
APPRLICDSRVLNRYLLEAKEAENITTGCAEHCSLNENITVPDTKVNFYAWKRMEVGQQAVEVWQGLALLSEAVLRGQALLVNSSQPWEPLQLHVDKAVSGLRSLTTLLRALGAQKEAISPPDAASAAPLRTITADTFRKLFRVYSNFLRGKLKLYTGEACRTGDR

SEQ ID NO: 1506 - protein, 166 aa, Homo sapiens
  EPO_R14H
APPRLICDSRVLEHYLLEAKEAENITTGCAEHCSLNENITVPDTKVNFYAWKRMEVGQQAVEVWQGLALLSEAVLRGQALLVNSSQPWEPLQLHVDKAVSGLRSLTTLLRALGAQKEAISPPDAASAAPLRTITADTFRKLFRVYSNFLRGKLKLYTGEACRTGDR

SEQ ID NO: 1507 - protein, 166 aa, Homo sapiens
  EPO_R14Q
APPRLICDSRVLEQYLLEAKEAENITTGCAEHCSLNENITVPDTKVNFYAWKRMEVGQQAVEVWQGLALLSEAVLRGQALLVNSSQPWEPLQLHVDKAVSGLRSLTTLLRALGAQKEAISPPDAASAAPLRTITADTFRKLFRVYSNFLRGKLKLYTGEACRTGDR

SEQ ID NO: 1508 - protein, 166 aa, Homo sapiens
  EPO_Y15H
APPRLICDSRVLERHLLEAKEAENITTGCAEHCSLNENITVPDTKVNFYAWKRMEVGQQAVEVWQGLALLSEAVLRGQALLVNSSQPWEPLQLHVDKAVSGLRSLTTLLRALGAQKEAISPPDAASAAPLRTITADTFRKLFRVYSNFLRGKLKLYTGEACRTGDR

SEQ ID NO: 1509 - protein, 166 aa, Homo sapiens
  EPO_Y15I
APPRLICDSRVLERILLEAKEAENITTGCAEHCSLNENITVPDTKVNFYAWKRMEVGQQAVEVWQGLALLSEAVLRGQALLVNSSQPWEPLQLHVDKAVSGLRSLTTLLRALGAQKEAISPPDAASAAPLRTITADTFRKLFRVYSNFLRGKLKLYTGEACRTGDR

SEQ ID NO: 1510 - protein, 166 aa, Homo sapiens
  EPO_Y15K
APPRLICDSRVLERKLLEAKEAENITTGCAEHCSLNENITVPDTKVNFYAWKRMEVGQQAVEVWQGLALLSEAVLRGQALLVNSSQPWEPLQLHVDKAVSGLRSLTTLLRALGAQKEAISPPDAASAAPLRTITADTFRKLFRVYSNFLRGKLKLYTGEACRTGDR

SEQ ID NO: 1511 - protein, 166 aa, Homo sapiens
  EPO_Y15R
APPRLICDSRVLERRLLEAKEAENITTGCAEHCSLNENITVPDTKVNFYAWKRMEVGQQAVEVWQGLALLSEAVLRGQALLVNSSQPWEPLQLHVDKAVSGLRSLTTLLRALGAQKEAISPPDAASAAPLRTITADTFRKLFRVYSNFLRGKLKLYTGEACRTGDR

SEQ ID NO: 1512 - protein, 166 aa, Homo sapiens
  EPO_L16I
APPRLICDSRVLERYILEAKEAENITTGCAEHCSLNENITVPDTKVNFYAWKRMEVGQQAVEVWQGLALLSEAVLRGQALLVNSSQPWEPLQLHVDKAVSGLRSLTTLLRALGAQKEAISPPDAASAAPLRTITADTFRKLFRVYSNFLRGKLKLYTGEACRTGDR

SEQ ID NO: 1513 - protein, 166 aa, Homo sapiens
  EPO_L16V
APPRLICDSRVLERYVLEAKEAENITTGCAEHCSLNENITVPDTKVNFYAWKRMEVGQQAVEVWQGLALLSEAVLRGQALLVNSSQPWEPLQLHVDKAVSGLRSLTTLLRALGAQKEAISPPDAASAAPLRTITADTFRKLFRVYSNFLRGKLKLYTGEACRTGDR

SEQ ID NO: 1514 - protein, 166 aa, Homo sapiens
  EPO_L16E
APPRLICDSRVLERYELEAKEAENITTGCAEHCSLNENITVPDTKVNFYAWKRMEVGQQAVEVWQGLALLSEAVLRGQALLVNSSQPWEPLQLHVDKAVSGLRSLTTLLRALGAQKEAISPPDAASAAPLRTITADTFRKLFRVYSNFLRGKLKLYTGEACRTGDR

SEQ ID NO: 1515 - protein, 166 aa, Homo sapiens
  EPO_L16D
APPRLICDSRVLERYDLEAKEAENITTGCAEHCSLNENITVPDTKVNFYAWKRMEVGQQAVEVWQGLALLSEAVLRGQALLVNSSQPWEPLQLHVDKAVSGLRSLTTLLRALGAQKEAISPPDAASAAPLRTITADTFRKLFRVYSNFLRGKLKLYTGEACRTGDR

SEQ ID NO: 1516 - protein, 166 aa, Homo sapiens
  EPO_L16K
APPRLICDSRVLERYKLEAKEAENITTGCAEHCSLNENITVPDTKVNFYAWKRMEVGQQAVEVWQGLALLSEAVLRGQALLVNSSQPWEPLQLHVDKAVSGLRSLTTLLRALGAQKEAISPPDAASAAPLRTITADTFRKLFRVYSNFLRGKLKLYTGEACRTGDR

SEQ ID NO: 1517 - protein, 166 aa, Homo sapiens
  EPO_L16R
APPRLICDSRVLERYRLEAKEAENITTGCAEHCSLNENITVPDTKVNFYAWKRMEVGQQAVEVWQGLALLSEAVLRGQALLVNSSQPWEPLQLHVDKAVSGLRSLTTLLRALGAQKEAISPPDAASAAPLRTITADTFRKLFRVYSNFLRGKLKLYTGEACRTGDR

SEQ ID NO: 1518 - protein, 166 aa, Homo sapiens
  EPO_L17I
APPRLICDSRVLERYLIEAKEAENITTGCAEHCSLNENITVPDTKVNFYAWKRMEVGQQAVEVWQGLALLSEAVLRGQALLVNSSQPWEPLQLHVDKAVSGLRSLTTLLRALGAQKEAISPPDAASAAPLRTITADTFRKLFRVYSNFLRGKLKLYTGEACRTGDR

SEQ ID NO: 1519 - protein, 166 aa, Homo sapiens
  EPO_L17V
APPRLICDSRVLERYLVEAKEAENITTGCAEHCSLNENITVPDTKVNFYAWKRMEVGQQAVEVWQGLALLSEAVLRGQALLVNSSQPWEPLQLHVDKAVSGLRSLTTLLRALGAQKEAISPPDAASAAPLRTITADTFRKLFRVYSNFLRGKLKLYTGEACRTGDR

SEQ ID NO: 1520 - protein, 166 aa, Homo sapiens
  EPO_L17E
APPRLICDSRVLERYLEEAKEAENITTGCAEHCSLNENITVPDTKVNFYAWKRMEVGQQAVEVWQGLALLSEAVLRGQALLVNSSQPWEPLQLHVDKAVSGLRSLTTLLRALGAQKEAISPPDAASAAPLRTITADTFRKLFRVYSNFLRGKLKLYTGEACRTGDR

SEQ ID NO: 1521 - protein, 166 aa, Homo sapiens
  EPO_L17D
APPRLICDSRVLERYLDEAKEAENITTGCAEHCSLNENITVPDTKVNFYAWKRMEVGQQAVEVWQGLALLSEAVLRGQALLVNSSQPWEPLQLHVDKAVSGLRSLTTLLRALGAQKEAISPPDAASAAPLRTITADTFRKLFRVYSNFLRGKLKLYTGEACRTGDR

SEQ ID NO: 1522 - protein, 166 aa, Homo sapiens
  EPO_L17K
APPRLICDSRVLERYLKEAKEAENITTGCAEHCSLNENITVPDTKVNFYAWKRMEVGQQAVEVWQGLALLSEAVLRGQALLVNSSQPWEPLQLHVDKAVSGLRSLTTLLRALGAQKEAISPPDAASAAPLRTITADTFRKLFRVYSNFLRGKLKLYTGEACRTGDR

SEQ ID NO: 1523 - protein, 166 aa, Homo sapiens
  EPO_L17R
APPRLICDSRVLERYLREAKEAENITTGCAEHCSLNENITVPDTKVNFYAWKRMEVGQQAVEVWQGLALLSEAVLRGQALLVNSSQPWEPLQLHVDKAVSGLRSLTTLLRALGAQKEAISPPDAASAAPLRTITADTFRKLFRVYSNFLRGKLKLYTGEACRTGDR

SEQ ID NO: 1524 - protein, 166 aa, Homo sapiens
  EPO_E18Q
APPRLICDSRVLERYLLQAKEAENITTGCAEHCSLNENITVPDTKVNFYAWKRMEVGQQAVEVWQGLALLSEAVLRGQALLVNSSQPWEPLQLHVDKAVSGLRSLTTLLRALGAQKEAISPPDAASAAPLRTITADTFRKLFRVYSNFLRGKLKLYTGEACRTGDR

SEQ ID NO: 1525 - protein, 166 aa, Homo sapiens
  EPO_E18H
APPRLICDSRVLERYLLHAKEAENITTGCAEHCSLNENITVPDTKVNFYAWKRMEVGQQAVEVWQGLALLSEAVLRGQALLVNSSQPWEPLQLHVDKAVSGLRSLTTLLRALGAQKEAISPPDAASAAPLRTITADTFRKLFRVYSNFLRGKLKLYTGEACRTGDR

SEQ ID NO: 1526 - protein, 166 aa, Homo sapiens
  EPO_E18N
APPRLICDSRVLERYLLNAKEAENITTGCAEHCSLNENITVPDTKVNFYAWKRMEVGQQAVEVWQGLALLSEAVLRGQALLVNSSQPWEPLQLHVDKAVSGLRSLTTLLRALGAQKEAISPPDAASAAPLRTITADTFRKLFRVYSNFLRGKLKLYTGEACRTGDR

SEQ ID NO: 1527 - protein, 166 aa, Homo sapiens
  EPO_E18K
APPRLICDSRVLERYLLKAKEAENITTGCAEHCSLNENITVPDTKVNFYAWKRMEVGQQAVEVWQGLALLSEAVLRGQALLVNSSQPWEPLQLHVDKAVSGLRSLTTLLRALGAQKEAISPPDAASAAPLRTITADTFRKLFRVYSNFLRGKLKLYTGEACRTGDR

SEQ ID NO: 1528 - protein, 166 aa, Homo sapiens
  EPO_E18R
APPRLICDSRVLERYLLRAKEAENITTGCAEHCSLNENITVPDTKVNFYAWKRMEVGQQAVEVWQGLALLSEAVLRGQALLVNSSQPWEPLQLHVDKAVSGLRSLTTLLRALGAQKEAISPPDAASAAPLRTITADTFRKLFRVYSNFLRGKLKLYTGEACRTGDR

SEQ ID NO: 1529 - protein, 166 aa, Homo sapiens
  EPO_K20Q
APPRLICDSRVLERYLLEAQEAENITTGCAEHCSLNENITVPDTKVNFYAWKRMEVGQQAVEVWQGLALLSEAVLRGQALLVNSSQPWEPLQLHVDKAVSGLRSLTTLLRALGAQKEAISPPDAASAAPLRTITADTFRKLFRVYSNFLRGKLKLYTGEACRTGDR

SEQ ID NO: 1530 - protein, 166 aa, Homo sapiens
  EPO_K20T
APPRLICDSRVLERYLLEATEAENITTGCAEHCSLNENITVPDTKVNFYAWKRMEVGQQAVEVWQGLALLSEAVLRGQALLVNSSQPWEPLQLHVDKAVSGLRSLTTLLRALGAQKEAISPPDAASAAPLRTITADTFRKLFRVYSNFLRGKLKLYTGEACRTGDR

SEQ ID NO: 1531 - protein, 166 aa, Homo sapiens
  EPO_K20N
APPRLICDSRVLERYLLEANEAENITTGCAEHCSLNENITVPDTKVNFYAWKRMEVGQQAVEVWQGLALLSEAVLRGQALLVNSSQPWEPLQLHVDKAVSGLRSLTTLLRALGAQKEAISPPDAASAAPLRTITADTFRKLFRVYSNFLRGKLKLYTGEACRTGDR

SEQ ID NO: 1532 - protein, 166 aa, Homo sapiens
  EPO_E21Q
APPRLICDSRVLERYLLEAKQAENITTGCAEHCSLNENITVPDTKVNFYAWKRMEVGQQAVEVWQGLALLSEAVLRGQALLVNSSQPWEPLQLHVDKAVSGLRSLTTLLRALGAQKEAISPPDAASAAPLRTITADTFRKLFRVYSNFLRGKLKLYTGEACRTGDR

SEQ ID NO: 1533 - protein, 166 aa, Homo sapiens
  EPO_E21H
APPRLICDSRVLERYLLEAKHAENITTGCAEHCSLNENITVPDTKVNFYAWKRMEVGQQAVEVWQGLALLSEAVLRGQALLVNSSQPWEPLQLHVDKAVSGLRSLTTLLRALGAQKEAISPPDAASAAPLRTITADTFRKLFRVYSNFLRGKLKLYTGEACRTGDR

SEQ ID NO: 1534 - protein, 166 aa, Homo sapiens
  EPO_E21N
APPRLICDSRVLERYLLEAKNAENITTGCAEHCSLNENITVPDTKVNFYAWKRMEVGQQAVEVWQGLALLSEAVLRGQALLVNSSQPWEPLQLHVDKAVSGLRSLTTLLRALGAQKEAISPPDAASAAPLRTITADTFRKLFRVYSNFLRGKLKLYTGEACRTGDR

SEQ ID NO: 1535 - protein, 166 aa, Homo sapiens
  EPO_E21K
APPRLICDSRVLERYLLEAKKAENITTGCAEHCSLNENITVPDTKVNFYAWKRMEVGQQAVEVWQGLALLSEAVLRGQALLVNSSQPWEPLQLHVDKAVSGLRSLTTLLRALGAQKEAISPPDAASAAPLRTITADTFRKLFRVYSNFLRGKLKLYTGEACRTGDR

SEQ ID NO: 1536 - protein, 166 aa, Homo sapiens
  EPO_E21R
APPRLICDSRVLERYLLEAKRAENITTGCAEHCSLNENITVPDTKVNFYAWKRMEVGQQAVEVWQGLALLSEAVLRGQALLVNSSQPWEPLQLHVDKAVSGLRSLTTLLRALGAQKEAISPPDAASAAPLRTITADTFRKLFRVYSNFLRGKLKLYTGEACRTGDR

SEQ ID NO: 1537 - protein, 166 aa, Homo sapiens
  EPO_E23Q
APPRLICDSRVLERYLLEAKEAQNITTGCAEHCSLNENITVPDTKVNFYAWKRMEVGQQAVEVWQGLALLSEAVLRGQALLVNSSQPWEPLQLHVDKAVSGLRSLTTLLRALGAQKEAISPPDAASAAPLRTITADTFRKLFRVYSNFLRGKLKLYTGEACRTGDR

SEQ ID NO: 1538 - protein, 166 aa, Homo sapiens
  EPO_E23H
APPRLICDSRVLERYLLEAKEAHNITTGCAEHCSLNENITVPDTKVNFYAWKRMEVGQQAVEVWQGLALLSEAVLRGQALLVNSSQPWEPLQLHVDKAVSGLRSLTTLLRALGAQKEAISPPDAASAAPLRTITADTFRKLFRVYSNFLRGKLKLYTGEACRTGDR

SEQ ID NO: 1539 - protein, 166 aa, Homo sapiens
  EPO_E23N
APPRLICDSRVLERYLLEAKEANNITTGCAEHCSLNENITVPDTKVNFYAWKRMEVGQQAVEVWQGLALLSEAVLRGQALLVNSSQPWEPLQLHVDKAVSGLRSLTTLLRALGAQKEAISPPDAASAAPLRTITADTFRKLFRVYSNFLRGKLKLYTGEACRTGDR

SEQ ID NO: 1540 - protein, 166 aa, Homo sapiens
  EPO_E23K
APPRLICDSRVLERYLLEAKEAKNITTGCAEHCSLNENITVPDTKVNFYAWKRMEVGQQAVEVWQGLALLSEAVLRGQALLVNSSQPWEPLQLHVDKAVSGLRSLTTLLRALGAQKEAISPPDAASAAPLRTITADTFRKLFRVYSNFLRGKLKLYTGEACRTGDR

SEQ ID NO: 1541 - protein, 166 aa, Homo sapiens
  EPO_E23R
APPRLICDSRVLERYLLEAKEARNITTGCAEHCSLNENITVPDTKVNFYAWKRMEVGQQAVEVWQGLALLSEAVLRGQALLVNSSQPWEPLQLHVDKAVSGLRSLTTLLRALGAQKEAISPPDAASAAPLRTITADTFRKLFRVYSNFLRGKLKLYTGEACRTGDR

SEQ ID NO: 1542 - protein, 166 aa, Homo sapiens
  EPO_I25K
APPRLICDSRVLERYLLEAKEAENKTTGCAEHCSLNENITVPDTKVNFYAWKRMEVGQQAVEVWQGLALLSEAVLRGQALLVNSSQPWEPLQLHVDKAVSGLRSLTTLLRALGAQKEAISPPDAASAAPLRTITADTFRKLFRVYSNFLRGKLKLYTGEACRTGDR

SEQ ID NO: 1543 - protein, 166 aa, Homo sapiens
  EPO_I25R
APPRLICDSRVLERYLLEAKEAENRTTGCAEHCSLNENITVPDTKVNFYAWKRMEVGQQAVEVWQGLALLSEAVLRGQALLVNSSQPWEPLQLHVDKAVSGLRSLTTLLRALGAQKEAISPPDAASAAPLRTITADTFRKLFRVYSNFLRGKLKLYTGEACRTGDR

SEQ ID NO: 1544 - protein, 166 aa, Homo sapiens
  EPO_T26E
APPRLICDSRVLERYLLEAKEAENIETGCAEHCSLNENITVPDTKVNFYAWKRMEVGQQAVEVWQGLALLSEAVLRGQALLVNSSQPWEPLQLHVDKAVSGLRSLTTLLRALGAQKEAISPPDAASAAPLRTITADTFRKLFRVYSNFLRGKLKLYTGEACRTGDR

SEQ ID NO: 1545 - protein, 166 aa, Homo sapiens
  EPO_T26D
APPRLICDSRVLERYLLEAKEAENIDTGCAEHCSLNENITVPDTKVNFYAWKRMEVGQQAVEVWQGLALLSEAVLRGQALLVNSSQPWEPLQLHVDKAVSGLRSLTTLLRALGAQKEAISPPDAASAAPLRTITADTFRKLFRVYSNFLRGKLKLYTGEACRTGDR

SEQ ID NO: 1546 - protein, 166 aa, Homo sapiens
  EPO_T26K
APPRLICDSRVLERYLLEAKEAENIKTGCAEHCSLNENITVPDTKVNFYAWKRMEVGQQAVEVWQGLALLSEAVLRGQALLVNSSQPWEPLQLHVDKAVSGLRSLTTLLRALGAQKEAISPPDAASAAPLRTITADTFRKLFRVYSNFLRGKLKLYTGEACRTGDR

SEQ ID NO: 1547 - protein, 166 aa, Homo sapiens
  EPO_T26R
APPRLICDSRVLERYLLEAKEAENIRTGCAEHCSLNENITVPDTKVNFYAWKRMEVGQQAVEVWQGLALLSEAVLRGQALLVNSSQPWEPLQLHVDKAVSGLRSLTTLLRALGAQKEAISPPDAASAAPLRTITADTFRKLFRVYSNFLRGKLKLYTGEACRTGDR

SEQ ID NO: 1548 - protein, 166 aa, Homo sapiens
  EPO_T27E
APPRLICDSRVLERYLLEAKEAENITEGCAEHCSLNENITVPDTKVNFYAWKRMEVGQQAVEVWQGLALLSEAVLRGQALLVNSSQPWEPLQLHVDKAVSGLRSLTTLLRALGAQKEAISPPDAASAAPLRTITADTFRKLFRVYSNFLRGKLKLYTGEACRTGDR

SEQ ID NO: 1549 - protein, 166 aa, Homo sapiens
  EPO_T27D
APPRLICDSRVLERYLLEAKEAENITDGCAEHCSLNENITVPDTKVNFYAWKRMEVGQQAVEVWQGLALLSEAVLRGQALLVNSSQPWEPLQLHVDKAVSGLRSLTTLLRALGAQKEAISPPDAASAAPLRTITADTFRKLFRVYSNFLRGKLKLYTGEACRTGDR

SEQ ID NO: 1550 - protein, 166 aa, Homo sapiens
  EPO_T27K
APPRLICDSRVLERYLLEAKEAENITKGCAEHCSLNENITVPDTKVNFYAWKRMEVGQQAVEVWQGLALLSEAVLRGQALLVNSSQPWEPLQLHVDKAVSGLRSLTTLLRALGAQKEAISPPDAASAAPLRTITADTFRKLFRVYSNFLRGKLKLYTGEACRTGDR

SEQ ID NO: 1551 - protein, 166 aa, Homo sapiens
  EPO_T27R
APPRLICDSRVLERYLLEAKEAENITRGCAEHCSLNENITVPDTKVNFYAWKRMEVGQQAVEVWQGLALLSEAVLRGQALLVNSSQPWEPLQLHVDKAVSGLRSLTTLLRALGAQKEAISPPDAASAAPLRTITADTFRKLFRVYSNFLRGKLKLYTGEACRTGDR

SEQ ID NO: 1552 - protein, 166 aa, Homo sapiens
  EPO_G28E
APPRLICDSRVLERYLLEAKEAENITTECAEHCSLNENITVPDTKVNFYAWKRMEVGQQAVEVWQGLALLSEAVLRGQALLVNSSQPWEPLQLHVDKAVSGLRSLTTLLRALGAQKEAISPPDAASAAPLRTITADTFRKLFRVYSNFLRGKLKLYTGEACRTGDR

SEQ ID NO: 1553 - protein, 166 aa, Homo sapiens
  EPO_G28D
APPRLICDSRVLERYLLEAKEAENITTDCAEHCSLNENITVPDTKVNFYAWKRMEVGQQAVEVWQGLALLSEAVLRGQALLVNSSQPWEPLQLHVDKAVSGLRSLTTLLRALGAQKEAISPPDAASAAPLRTITADTFRKLFRVYSNFLRGKLKLYTGEACRTGDR

SEQ ID NO: 1554 - protein, 166 aa, Homo sapiens
  EPO_G28K
APPRLICDSRVLERYLLEAKEAENITTKCAEHCSLNENITVPDTKVNFYAWKRMEVGQQAVEVWQGLALLSEAVLRGQALLVNSSQPWEPLQLHVDKAVSGLRSLTTLLRALGAQKEAISPPDAASAAPLRTITADTFRKLFRVYSNFLRGKLKLYTGEACRTGDR

SEQ ID NO: 1555 - protein, 166 aa, Homo sapiens
  EPO_G28R
APPRLICDSRVLERYLLEAKEAENITTRCAEHCSLNENITVPDTKVNFYAWKRMEVGQQAVEVWQGLALLSEAVLRGQALLVNSSQPWEPLQLHVDKAVSGLRSLTTLLRALGAQKEAISPPDAASAAPLRTITADTFRKLFRVYSNFLRGKLKLYTGEACRTGDR

SEQ ID NO: 1556 - protein, 166 aa, Homo sapiens
  EPO_C29S
APPRLICDSRVLERYLLEAKEAENITTGSAEHCSLNENITVPDTKVNFYAWKRMEVGQQAVEVWQGLALLSEAVLRGQALLVNSSQPWEPLQLHVDKAVSGLRSLTTLLRALGAQKEAISPPDAASAAPLRTITADTFRKLFRVYSNFLRGKLKLYTGEACRTGDR

SEQ ID NO: 1557 - protein, 166 aa, Homo sapiens
  EPO_C29V
APPRLICDSRVLERYLLEAKEAENITTGVAEHCSLNENITVPDTKVNFYAWKRMEVGQQAVEVWQGLALLSEAVLRGQALLVNSSQPWEPLQLHVDKAVSGLRSLTTLLRALGAQKEAISPPDAASAAPLRTITADTFRKLFRVYSNFLRGKLKLYTGEACRTGDR

SEQ ID NO: 1558 - protein, 166 aa, Homo sapiens
  EPO_C29A
APPRLICDSRVLERYLLEAKEAENITTGAAEHCSLNENITVPDTKVNFYAWKRMEVGQQAVEVWQGLALLSEAVLRGQALLVNSSQPWEPLQLHVDKAVSGLRSLTTLLRALGAQKEAISPPDAASAAPLRTITADTFRKLFRVYSNFLRGKLKLYTGEACRTGDR

SEQ ID NO: 1559 - protein, 166 aa, Homo sapiens
  EPO_C29I
APPRLICDSRVLERYLLEAKEAENITTGIAEHCSLNENITVPDTKVNFYAWKRMEVGQQAVEVWQGLALLSEAVLRGQALLVNSSQPWEPLQLHVDKAVSGLRSLTTLLRALGAQKEAISPPDAASAAPLRTITADTFRKLFRVYSNFLRGKLKLYTGEACRTGDR

SEQ ID NO: 1560 - protein, 166 aa, Homo sapiens
  EPO_C29T
APPRLICDSRVLERYLLEAKEAENITTGTAEHCSLNENITVPDTKVNFYAWKRMEVGQQAVEVWQGLALLSEAVLRGQALLVNSSQPWEPLQLHVDKAVSGLRSLTTLLRALGAQKEAISPPDAASAAPLRTITADTFRKLFRVYSNFLRGKLKLYTGEACRTGDR

SEQ ID NO: 1561 - protein, 166 aa, Homo sapiens
  EPO_C29K
APPRLICDSRVLERYLLEAKEAENITTGKAEHCSLNENITVPDTKVNFYAWKRMEVGQQAVEVWQGLALLSEAVLRGQALLVNSSQPWEPLQLHVDKAVSGLRSLTTLLRALGAQKEAISPPDAASAAPLRTITADTFRKLFRVYSNFLRGKLKLYTGEACRTGDR

SEQ ID NO: 1562 - protein, 166 aa, Homo sapiens
  EPO_C29R
APPRLICDSRVLERYLLEAKEAENITTGRAEHCSLNENITVPDTKVNFYAWKRMEVGQQAVEVWQGLALLSEAVLRGQALLVNSSQPWEPLQLHVDKAVSGLRSLTTLLRALGAQKEAISPPDAASAAPLRTITADTFRKLFRVYSNFLRGKLKLYTGEACRTGDR

SEQ ID NO: 1563 - protein, 166 aa, Homo sapiens
  EPO_A30E
APPRLICDSRVLERYLLEAKEAENITTGCEEHCSLNENITVPDTKVNFYAWKRMEVGQQAVEVWQGLALLSEAVLRGQALLVNSSQPWEPLQLHVDKAVSGLRSLTTLLRALGAQKEAISPPDAASAAPLRTITADTFRKLFRVYSNFLRGKLKLYTGEACRTGDR

SEQ ID NO: 1564 - protein, 166 aa, Homo sapiens
  EPO_A30D
APPRLICDSRVLERYLLEAKEAENITTGCDEHCSLNENITVPDTKVNFYAWKRMEVGQQAVEVWQGLALLSEAVLRGQALLVNSSQPWEPLQLHVDKAVSGLRSLTTLLRALGAQKEAISPPDAASAAPLRTITADTFRKLFRVYSNFLRGKLKLYTGEACRTGDR

SEQ ID NO: 1565 - protein, 166 aa, Homo sapiens
  EPO_A30K
APPRLICDSRVLERYLLEAKEAENITTGCKEHCSLNENITVPDTKVNFYAWKRMEVGQQAVEVWQGLALLSEAVLRGQALLVNSSQPWEPLQLHVDKAVSGLRSLTTLLRALGAQKEAISPPDAASAAPLRTITADTFRKLFRVYSNFLRGKLKLYTGEACRTGDR

SEQ ID NO: 1566 - protein, 166 aa, Homo sapiens
  EPO_A30R
APPRLICDSRVLERYLLEAKEAENITTGCREHCSLNENITVPDTKVNFYAWKRMEVGQQAVEVWQGLALLSEAVLRGQALLVNSSQPWEPLQLHVDKAVSGLRSLTTLLRALGAQKEAISPPDAASAAPLRTITADTFRKLFRVYSNFLRGKLKLYTGEACRTGDR

SEQ ID NO: 1567 - protein, 166 aa, Homo sapiens
  EPO_E31Q
APPRLICDSRVLERYLLEAKEAENITTGCAQHCSLNENITVPDTKVNFYAWKRMEVGQQAVEVWQGLALLSEAVLRGQALLVNSSQPWEPLQLHVDKAVSGLRSLTTLLRALGAQKEAISPPDAASAAPLRTITADTFRKLFRVYSNFLRGKLKLYTGEACRTGDR

SEQ ID NO: 1568 - protein, 166 aa, Homo sapiens
  EPO_E31H
APPRLICDSRVLERYLLEAKEAENITTGCAHHCSLNENITVPDTKVNFYAWKRMEVGQQAVEVWQGLALLSEAVLRGQALLVNSSQPWEPLQLHVDKAVSGLRSLTTLLRALGAQKEAISPPDAASAAPLRTITADTFRKLFRVYSNFLRGKLKLYTGEACRTGDR

SEQ ID NO: 1569 - protein, 166 aa, Homo sapiens
  EPO_E31N
APPRLICDSRVLERYLLEAKEAENITTGCANHCSLNENITVPDTKVNFYAWKRMEVGQQAVEVWQGLALLSEAVLRGQALLVNSSQPWEPLQLHVDKAVSGLRSLTTLLRALGAQKEAISPPDAASAAPLRTITADTFRKLFRVYSNFLRGKLKLYTGEACRTGDR

SEQ ID NO: 1570 - protein, 166 aa, Homo sapiens
  EPO_H32K
APPRLICDSRVLERYLLEAKEAENITTGCAEKCSLNENITVPDTKVNFYAWKRMEVGQQAVEVWQGLALLSEAVLRGQALLVNSSQPWEPLQLHVDKAVSGLRSLTTLLRALGAQKEAISPPDAASAAPLRTITADTFRKLFRVYSNFLRGKLKLYTGEACRTGDR

SEQ ID NO: 1571 - protein, 166 aa, Homo sapiens
  EPO_H32R
APPRLICDSRVLERYLLEAKEAENITTGCAERCSLNENITVPDTKVNFYAWKRMEVGQQAVEVWQGLALLSEAVLRGQALLVNSSQPWEPLQLHVDKAVSGLRSLTTLLRALGAQKEAISPPDAASAAPLRTITADTFRKLFRVYSNFLRGKLKLYTGEACRTGDR

SEQ ID NO: 1572 - protein, 166 aa, Homo sapiens
  EPO_C33K
APPRLICDSRVLERYLLEAKEAENITTGCAEHKSLNENITVPDTKVNFYAWKRMEVGQQAVEVWQGLALLSEAVLRGQALLVNSSQPWEPLQLHVDKAVSGLRSLTTLLRALGAQKEAISPPDAASAAPLRTITADTFRKLFRVYSNFLRGKLKLYTGEACRTGDR

SEQ ID NO: 1573 - protein, 166 aa, Homo sapiens
  EPO_C33R
APPRLICDSRVLERYLLEAKEAENITTGCAEHRSLNENITVPDTKVNFYAWKRMEVGQQAVEVWQGLALLSEAVLRGQALLVNSSQPWEPLQLHVDKAVSGLRSLTTLLRALGAQKEAISPPDAASAAPLRTITADTFRKLFRVYSNFLRGKLKLYTGEACRTGDR

SEQ ID NO: 1574 - protein, 166 aa, Homo sapiens
  EPO_S34K
APPRLICDSRVLERYLLEAKEAENITTGCAEHCKLNENITVPDTKVNFYAWKRMEVGQQAVEVWQGLALLSEAVLRGQALLVNSSQPWEPLQLHVDKAVSGLRSLTTLLRALGAQKEAISPPDAASAAPLRTITADTFRKLFRVYSNFLRGKLKLYTGEACRTGDR

SEQ ID NO: 1575 - protein, 166 aa, Homo sapiens
  EPO_S34R
APPRLICDSRVLERYLLEAKEAENITTGCAEHCRLNENITVPDTKVNFYAWKRMEVGQQAVEVWQGLALLSEAVLRGQALLVNSSQPWEPLQLHVDKAVSGLRSLTTLLRALGAQKEAISPPDAASAAPLRTITADTFRKLFRVYSNFLRGKLKLYTGEACRTGDR

SEQ ID NO: 1576 - protein, 166 aa, Homo sapiens
  EPO_L35V
APPRLICDSRVLERYLLEAKEAENITTGCAEHCSVNENITVPDTKVNFYAWKRMEVGQQAVEVWQGLALLSEAVLRGQALLVNSSQPWEPLQLHVDKAVSGLRSLTTLLRALGAQKEAISPPDAASAAPLRTITADTFRKLFRVYSNFLRGKLKLYTGEACRTGDR

SEQ ID NO: 1577 - protein, 166 aa, Homo sapiens
  EPO_L35K
APPRLICDSRVLERYLLEAKEAENITTGCAEHCSKNENITVPDTKVNFYAWKRMEVGQQAVEVWQGLALLSEAVLRGQALLVNSSQPWEPLQLHVDKAVSGLRSLTTLLRALGAQKEAISPPDAASAAPLRTITADTFRKLFRVYSNFLRGKLKLYTGEACRTGDR

SEQ ID NO: 1578 - protein, 166 aa, Homo sapiens
  EPO_L35R
APPRLICDSRVLERYLLEAKEAENITTGCAEHCSRNENITVPDTKVNFYAWKRMEVGQQAVEVWQGLALLSEAVLRGQALLVNSSQPWEPLQLHVDKAVSGLRSLTTLLRALGAQKEAISPPDAASAAPLRTITADTFRKLFRVYSNFLRGKLKLYTGEACRTGDR

SEQ ID NO: 1579 - protein, 166 aa, Homo sapiens
  EPO_L35I
APPRLICDSRVLERYLLEAKEAENITTGCAEHCSINENITVPDTKVNFYAWKRMEVGQQAVEVWQGLALLSEAVLRGQALLVNSSQPWEPLQLHVDKAVSGLRSLTTLLRALGAQKEAISPPDAASAAPLRTITADTFRKLFRVYSNFLRGKLKLYTGEACRTGDR

SEQ ID NO: 1580 - protein, 166 aa, Homo sapiens
  EPO_N36E
APPRLICDSRVLERYLLEAKEAENITTGCAEHCSLEENITVPDTKVNFYAWKRMEVGQQAVEVWQGLALLSEAVLRGQALLVNSSQPWEPLQLHVDKAVSGLRSLTTLLRALGAQKEAISPPDAASAAPLRTITADTFRKLFRVYSNFLRGKLKLYTGEACRTGDR

SEQ ID NO: 1581 - protein, 166 aa, Homo sapiens
  EPO_N36D
APPRLICDSRVLERYLLEAKEAENITTGCAEHCSLDENITVPDTKVNFYAWKRMEVGQQAVEVWQGLALLSEAVLRGQALLVNSSQPWEPLQLHVDKAVSGLRSLTTLLRALGAQKEAISPPDAASAAPLRTITADTFRKLFRVYSNFLRGKLKLYTGEACRTGDR

SEQ ID NO: 1582 - protein, 166 aa, Homo sapiens
  EPO_N36K
APPRLICDSRVLERYLLEAKEAENITTGCAEHCSLKENITVPDTKVNFYAWKRMEVGQQAVEVWQGLALLSEAVLRGQALLVNSSQPWEPLQLHVDKAVSGLRSLTTLLRALGAQKEAISPPDAASAAPLRTITADTFRKLFRVYSNFLRGKLKLYTGEACRTGDR

SEQ ID NO: 1583 - protein, 166 aa, Homo sapiens
  EPO_N36R
APPRLICDSRVLERYLLEAKEAENITTGCAEHCSLRENITVPDTKVNFYAWKRMEVGQQAVEVWQGLALLSEAVLRGQALLVNSSQPWEPLQLHVDKAVSGLRSLTTLLRALGAQKEAISPPDAASAAPLRTITADTFRKLFRVYSNFLRGKLKLYTGEACRTGDR

SEQ ID NO: 1584 - protein, 166 aa, Homo sapiens
  EPO_E37Q
APPRLICDSRVLERYLLEAKEAENITTGCAEHCSLNQNITVPDTKVNFYAWKRMEVGQQAVEVWQGLALLSEAVLRGQALLVNSSQPWEPLQLHVDKAVSGLRSLTTLLRALGAQKEAISPPDAASAAPLRTITADTFRKLFRVYSNFLRGKLKLYTGEACRTGDR

SEQ ID NO: 1585 - protein, 166 aa, Homo sapiens
  EPO_E37H
APPRLICDSRVLERYLLEAKEAENITTGCAEHCSLNHNITVPDTKVNFYAWKRMEVGQQAVEVWQGLALLSEAVLRGQALLVNSSQPWEPLQLHVDKAVSGLRSLTTLLRALGAQKEAISPPDAASAAPLRTITADTFRKLFRVYSNFLRGKLKLYTGEACRTGDR

SEQ ID NO: 1586 - protein, 166 aa, Homo sapiens
  EPO_E37N
APPRLICDSRVLERYLLEAKEAENITTGCAEHCSLNNNITVPDTKVNFYAWKRMEVGQQAVEVWQGLALLSEAVLRGQALLVNSSQPWEPLQLHVDKAVSGLRSLTTLLRALGAQKEAISPPDAASAAPLRTITADTFRKLFRVYSNFLRGKLKLYTGEACRTGDR

SEQ ID NO: 1587 - protein, 166 aa, Homo sapiens
  EPO_E37K
APPRLICDSRVLERYLLEAKEAENITTGCAEHCSLNKNITVPDTKVNFYAWKRMEVGQQAVEVWQGLALLSEAVLRGQALLVNSSQPWEPLQLHVDKAVSGLRSLTTLLRALGAQKEAISPPDAASAAPLRTITADTFRKLFRVYSNFLRGKLKLYTGEACRTGDR

SEQ ID NO: 1588 - protein, 166 aa, Homo sapiens
  EPO_E37R
APPRLICDSRVLERYLLEAKEAENITTGCAEHCSLNRNITVPDTKVNFYAWKRMEVGQQAVEVWQGLALLSEAVLRGQALLVNSSQPWEPLQLHVDKAVSGLRSLTTLLRALGAQKEAISPPDAASAAPLRTITADTFRKLFRVYSNFLRGKLKLYTGEACRTGDR

SEQ ID NO: 1589 - protein, 166 aa, Homo sapiens
  EPO_I39K
APPRLICDSRVLERYLLEAKEAENITTGCAEHCSLNENKTVPDTKVNFYAWKRMEVGQQAVEVWQGLALLSEAVLRGQALLVNSSQPWEPLQLHVDKAVSGLRSLTTLLRALGAQKEAISPPDAASAAPLRTITADTFRKLFRVYSNFLRGKLKLYTGEACRTGDR

SEQ ID NO: 1590 - protein, 166 aa, Homo sapiens
  EPO_I39R
APPRLICDSRVLERYLLEAKEAENITTGCAEHCSLNENRTVPDTKVNFYAWKRMEVGQQAVEVWQGLALLSEAVLRGQALLVNSSQPWEPLQLHVDKAVSGLRSLTTLLRALGAQKEAISPPDAASAAPLRTITADTFRKLFRVYSNFLRGKLKLYTGEACRTGDR

SEQ ID NO: 1591 - protein, 166 aa, Homo sapiens
  EPO_T40E
APPRLICDSRVLERYLLEAKEAENITTGCAEHCSLNENIEVPDTKVNFYAWKRMEVGQQAVEVWQGLALLSEAVLRGQALLVNSSQPWEPLQLHVDKAVSGLRSLTTLLRALGAQKEAISPPDAASAAPLRTITADTFRKLFRVYSNFLRGKLKLYTGEACRTGDR

SEQ ID NO: 1592 - protein, 166 aa, Homo sapiens
  EPO_T40D
APPRLICDSRVLERYLLEAKEAENITTGCAEHCSLNENIDVPDTKVNFYAWKRMEVGQQAVEVWQGLALLSEAVLRGQALLVNSSQPWEPLQLHVDKAVSGLRSLTTLLRALGAQKEAISPPDAASAAPLRTITADTFRKLFRVYSNFLRGKLKLYTGEACRTGDR

SEQ ID NO: 1593 - protein, 166 aa, Homo sapiens
  EPO_T40K
APPRLICDSRVLERYLLEAKEAENITTGCAEHCSLNENIKVPDTKVNFYAWKRMEVGQQAVEVWQGLALLSEAVLRGQALLVNSSQPWEPLQLHVDKAVSGLRSLTTLLRALGAQKEAISPPDAASAAPLRTITADTFRKLFRVYSNFLRGKLKLYTGEACRTGDR

SEQ ID NO: 1594 - protein, 166 aa, Homo sapiens
  EPO_T40R
APPRLICDSRVLERYLLEAKEAENITTGCAEHCSLNENIRVPDTKVNFYAWKRMEVGQQAVEVWQGLALLSEAVLRGQALLVNSSQPWEPLQLHVDKAVSGLRSLTTLLRALGAQKEAISPPDAASAAPLRTITADTFRKLFRVYSNFLRGKLKLYTGEACRTGDR

SEQ ID NO: 1595 - protein, 166 aa, Homo sapiens
  EPO_P42S
APPRLICDSRVLERYLLEAKEAENITTGCAEHCSLNENITVSDTKVNFYAWKRMEVGQQAVEVWQGLALLSEAVLRGQALLVNSSQPWEPLQLHVDKAVSGLRSLTTLLRALGAQKEAISPPDAASAAPLRTITADTFRKLFRVYSNFLRGKLKLYTGEACRTGDR

SEQ ID NO: 1596 - protein, 166 aa, Homo sapiens
  EPO_P42A
APPRLICDSRVLERYLLEAKEAENITTGCAEHCSLNENITVADTKVNFYAWKRMEVGQQAVEVWQGLALLSEAVLRGQALLVNSSQPWEPLQLHVDKAVSGLRSLTTLLRALGAQKEAISPPDAASAAPLRTITADTFRKLFRVYSNFLRGKLKLYTGEACRTGDR

SEQ ID NO: 1597 - protein, 166 aa, Homo sapiens
  EPO_P42K
APPRLICDSRVLERYLLEAKEAENITTGCAEHCSLNENITVKDTKVNFYAWKRMEVGQQAVEVWQGLALLSEAVLRGQALLVNSSQPWEPLQLHVDKAVSGLRSLTTLLRALGAQKEAISPPDAASAAPLRTITADTFRKLFRVYSNFLRGKLKLYTGEACRTGDR

SEQ ID NO: 1598 - protein, 166 aa, Homo sapiens
  EPO_P42R
APPRLICDSRVLERYLLEAKEAENITTGCAEHCSLNENITVRDTKVNFYAWKRMEVGQQAVEVWQGLALLSEAVLRGQALLVNSSQPWEPLQLHVDKAVSGLRSLTTLLRALGAQKEAISPPDAASAAPLRTITADTFRKLFRVYSNFLRGKLKLYTGEACRTGDR

SEQ ID NO: 1599 - protein, 166 aa, Homo sapiens
  EPO_D43Q
APPRLICDSRVLERYLLEAKEAENITTGCAEHCSLNENITVPQTKVNFYAWKRMEVGQQAVEVWQGLALLSEAVLRGQALLVNSSQPWEPLQLHVDKAVSGLRSLTTLLRALGAQKEAISPPDAASAAPLRTITADTFRKLFRVYSNFLRGKLKLYTGEACRTGDR

SEQ ID NO: 1600 - protein, 166 aa, Homo sapiens
  EPO_D43H
APPRLICDSRVLERYLLEAKEAENITTGCAEHCSLNENITVPHTKVNFYAWKRMEVGQQAVEVWQGLALLSEAVLRGQALLVNSSQPWEPLQLHVDKAVSGLRSLTTLLRALGAQKEAISPPDAASAAPLRTITADTFRKLFRVYSNFLRGKLKLYTGEACRTGDR

SEQ ID NO: 1601 - protein, 166 aa, Homo sapiens
  EPO_D43N
APPRLICDSRVLERYLLEAKEAENITTGCAEHCSLNENITVPNTKVNFYAWKRMEVGQQAVEVWQGLALLSEAVLRGQALLVNSSQPWEPLQLHVDKAVSGLRSLTTLLRALGAQKEAISPPDAASAAPLRTITADTFRKLFRVYSNFLRGKLKLYTGEACRTGDR

SEQ ID NO: 1602 - protein, 166 aa, Homo sapiens
  EPO_K45Q
APPRLICDSRVLERYLLEAKEAENITTGCAEHCSLNENITVPDTQVNFYAWKRMEVGQQAVEVWQGLALLSEAVLRGQALLVNSSQPWEPLQLHVDKAVSGLRSLTTLLRALGAQKEAISPPDAASAAPLRTITADTFRKLFRVYSNFLRGKLKLYTGEACRTGDR

SEQ ID NO: 1603 - protein, 166 aa, Homo sapiens
  EPO_K45T
APPRLICDSRVLERYLLEAKEAENITTGCAEHCSLNENITVPDTTVNFYAWKRMEVGQQAVEVWQGLALLSEAVLRGQALLVNSSQPWEPLQLHVDKAVSGLRSLTTLLRALGAQKEAISPPDAASAAPLRTITADTFRKLFRVYSNFLRGKLKLYTGEACRTGDR

SEQ ID NO: 1604 - protein, 166 aa, Homo sapiens
  EPO_K45N
APPRLICDSRVLERYLLEAKEAENITTGCAEHCSLNENITVPDTNVNFYAWKRMEVGQQAVEVWQGLALLSEAVLRGQALLVNSSQPWEPLQLHVDKAVSGLRSLTTLLRALGAQKEAISPPDAASAAPLRTITADTFRKLFRVYSNFLRGKLKLYTGEACRTGDR

SEQ ID NO: 1605 - protein, 166 aa, Homo sapiens
  EPO_F48I
APPRLICDSRVLERYLLEAKEAENITTGCAEHCSLNENITVPDTKVNIYAWKRMEVGQQAVEVWQGLALLSEAVLRGQALLVNSSQPWEPLQLHVDKAVSGLRSLTTLLRALGAQKEAISPPDAASAAPLRTITADTFRKLFRVYSNFLRGKLKLYTGEACRTGDR

SEQ ID NO: 1606 - protein, 166 aa, Homo sapiens
  EPO_F48V
APPRLICDSRVLERYLLEAKEAENITTGCAEHCSLNENITVPDTKVNVYAWKRMEVGQQAVEVWQGLALLSEAVLRGQALLVNSSQPWEPLQLHVDKAVSGLRSLTTLLRALGAQKEAISPPDAASAAPLRTITADTFRKLFRVYSNFLRGKLKLYTGEACRTGDR

SEQ ID NO: 1607 - protein, 166 aa, Homo sapiens
  EPO_Y49H
APPRLICDSRVLERYLLEAKEAENITTGCAEHCSLNENITVPDTKVNFHAWKRMEVGQQAVEVWQGLALLSEAVLRGQALLVNSSQPWEPLQLHVDKAVSGLRSLTTLLRALGAQKEAISPPDAASAAPLRTITADTFRKLFRVYSNFLRGKLKLYTGEACRTGDR

SEQ ID NO: 1608 - protein, 166 aa, Homo sapiens
  EPO_Y49I
APPRLICDSRVLERYLLEAKEAENITTGCAEHCSLNENITVPDTKVNFIAWKRMEVGQQAVEVWQGLALLSEAVLRGQALLVNSSQPWEPLQLHVDKAVSGLRSLTTLLRALGAQKEAISPPDAASAAPLRTITADTFRKLFRVYSNFLRGKLKLYTGEACRTGDR

SEQ ID NO: 1609 - protein, 166 aa, Homo sapiens
  EPO_W51S
APPRLICDSRVLERYLLEAKEAENITTGCAEHCSLNENITVPDTKVNFYASKRMEVGQQAVEVWQGLALLSEAVLRGQALLVNSSQPWEPLQLHVDKAVSGLRSLTTLLRALGAQKEAISPPDAASAAPLRTITADTFRKLFRVYSNFLRGKLKLYTGEACRTGDR

SEQ ID NO: 1610 - protein, 166 aa, Homo sapiens
  EPO_W51H
APPRLICDSRVLERYLLEAKEAENITTGCAEHCSLNENITVPDTKVNFYAHKRMEVGQQAVEVWQGLALLSEAVLRGQALLVNSSQPWEPLQLHVDKAVSGLRSLTTLLRALGAQKEAISPPDAASAAPLRTITADTFRKLFRVYSNFLRGKLKLYTGEACRTGDR

SEQ ID NO: 1611 - protein, 166 aa, Homo sapiens
  EPO_K52Q
APPRLICDSRVLERYLLEAKEAENITTGCAEHCSLNENITVPDTKVNFYAWQRMEVGQQAVEVWQGLALLSEAVLRGQALLVNSSQPWEPLQLHVDKAVSGLRSLTTLLRALGAQKEAISPPDAASAAPLRTITADTFRKLFRVYSNFLRGKLKLYTGEACRTGDR

SEQ ID NO: 1612 - protein, 166 aa, Homo sapiens
  EPO_K52T
APPRLICDSRVLERYLLEAKEAENITTGCAEHCSLNENITVPDTKVNFYAWTRMEVGQQAVEVWQGLALLSEAVLRGQALLVNSSQPWEPLQLHVDKAVSGLRSLTTLLRALGAQKEAISPPDAASAAPLRTITADTFRKLFRVYSNFLRGKLKLYTGEACRTGDR

SEQ ID NO: 1613 - protein, 166 aa, Homo sapiens
  EPO_K52N
APPRLICDSRVLERYLLEAKEAENITTGCAEHCSLNENITVPDTKVNFYAWNRMEVGQQAVEVWQGLALLSEAVLRGQALLVNSSQPWEPLQLHVDKAVSGLRSLTTLLRALGAQKEAISPPDAASAAPLRTITADTFRKLFRVYSNFLRGKLKLYTGEACRTGDR

SEQ ID NO: 1614 - protein, 166 aa, Homo sapiens
  EPO_R53H
APPRLICDSRVLERYLLEAKEAENITTGCAEHCSLNENITVPDTKVNFYAWKHMEVGQQAVEVWQGLALLSEAVLRGQALLVNSSQPWEPLQLHVDKAVSGLRSLTTLLRALGAQKEAISPPDAASAAPLRTITADTFRKLFRVYSNFLRGKLKLYTGEACRTGDR

SEQ ID NO: 1615 - protein, 166 aa, Homo sapiens
  EPO_R53Q
APPRLICDSRVLERYLLEAKEAENITTGCAEHCSLNENITVPDTKVNFYAWKQMEVGQQAVEVWQGLALLSEAVLRGQALLVNSSQPWEPLQLHVDKAVSGLRSLTTLLRALGAQKEAISPPDAASAAPLRTITADTFRKLFRVYSNFLRGKLKLYTGEACRTGDR

SEQ ID NO: 1616 - protein, 166 aa, Homo sapiens
  EPO_M54V
APPRLICDSRVLERYLLEAKEAENITTGCAEHCSLNENITVPDTKVNFYAWKRVEVGQQAVEVWQGLALLSEAVLRGQALLVNSSQPWEPLQLHVDKAVSGLRSLTTLLRALGAQKEAISPPDAASAAPLRTITADTFRKLFRVYSNFLRGKLKLYTGEACRTGDR

SEQ ID NO: 1617 - protein, 166 aa, Homo sapiens
  EPO_M54I
APPRLICDSRVLERYLLEAKEAENITTGCAEHCSLNENITVPDTKVNFYAWKRIEVGQQAVEVWQGLALLSEAVLRGQALLVNSSQPWEPLQLHVDKAVSGLRSLTTLLRALGAQKEAISPPDAASAAPLRTITADTFRKLFRVYSNFLRGKLKLYTGEACRTGDR

SEQ ID NO: 1618 - protein, 166 aa, Homo sapiens
  EPO_E55Q
APPRLICDSRVLERYLLEAKEAENITTGCAEHCSLNENITVPDTKVNFYAWKRMQVGQQAVEVWQGLALLSEAVLRGQALLVNSSQPWEPLQLHVDKAVSGLRSLTTLLRALGAQKEAISPPDAASAAPLRTITADTFRKLFRVYSNFLRGKLKLYTGEACRTGDR

SEQ ID NO: 1619 - protein, 166 aa, Homo sapiens
  EPO_E55H
APPRLICDSRVLERYLLEAKEAENITTGCAEHCSLNENITVPDTKVNFYAWKRMHVGQQAVEVWQGLALLSEAVLRGQALLVNSSQPWEPLQLHVDKAVSGLRSLTTLLRALGAQKEAISPPDAASAAPLRTITADTFRKLFRVYSNFLRGKLKLYTGEACRTGDR

SEQ ID NO: 1620 - protein, 166 aa, Homo sapiens
  EPO_E55N
APPRLICDSRVLERYLLEAKEAENITTGCAEHCSLNENITVPDTKVNFYAWKRMNVGQQAVEVWQGLALLSEAVLRGQALLVNSSQPWEPLQLHVDKAVSGLRSLTTLLRALGAQKEAISPPDAASAAPLRTITADTFRKLFRVYSNFLRGKLKLYTGEACRTGDR

SEQ ID NO: 1621 - protein, 166 aa, Homo sapiens
  EPO_V61K
APPRLICDSRVLERYLLEAKEAENITTGCAEHCSLNENITVPDTKVNFYAWKRMEVGQQAKEVWQGLALLSEAVLRGQALLVNSSQPWEPLQLHVDKAVSGLRSLTTLLRALGAQKEAISPPDAASAAPLRTITADTFRKLFRVYSNFLRGKLKLYTGEACRTGDR

SEQ ID NO: 1622 - protein, 166 aa, Homo sapiens
  EPO_V61R
APPRLICDSRVLERYLLEAKEAENITTGCAEHCSLNENITVPDTKVNFYAWKRMEVGQQAREVWQGLALLSEAVLRGQALLVNSSQPWEPLQLHVDKAVSGLRSLTTLLRALGAQKEAISPPDAASAAPLRTITADTFRKLFRVYSNFLRGKLKLYTGEACRTGDR

SEQ ID NO: 1623 - protein, 166 aa, Homo sapiens
  EPO_E62Q
APPRLICDSRVLERYLLEAKEAENITTGCAEHCSLNENITVPDTKVNFYAWKRMEVGQQAVQVWQGLALLSEAVLRGQALLVNSSQPWEPLQLHVDKAVSGLRSLTTLLRALGAQKEAISPPDAASAAPLRTITADTFRKLFRVYSNFLRGKLKLYTGEACRTGDR

SEQ ID NO: 1624 - protein, 166 aa, Homo sapiens
  EPO_E62H
APPRLICDSRVLERYLLEAKEAENITTGCAEHCSLNENITVPDTKVNFYAWKRMEVGQQAVHVWQGLALLSEAVLRGQALLVNSSQPWEPLQLHVDKAVSGLRSLTTLLRALGAQKEAISPPDAASAAPLRTITADTFRKLFRVYSNFLRGKLKLYTGEACRTGDR

SEQ ID NO: 1625 - protein, 166 aa, Homo sapiens
  EPO_E62N
APPRLICDSRVLERYLLEAKEAENITTGCAEHCSLNENITVPDTKVNFYAWKRMEVGQQAVNVWQGLALLSEAVLRGQALLVNSSQPWEPLQLHVDKAVSGLRSLTTLLRALGAQKEAISPPDAASAAPLRTITADTFRKLFRVYSNFLRGKLKLYTGEACRTGDR

SEQ ID NO: 1626 - protein, 166 aa, Homo sapiens
  EPO_E62K
APPRLICDSRVLERYLLEAKEAENITTGCAEHCSLNENITVPDTKVNFYAWKRMEVGQQAVKVWQGLALLSEAVLRGQALLVNSSQPWEPLQLHVDKAVSGLRSLTTLLRALGAQKEAISPPDAASAAPLRTITADTFRKLFRVYSNFLRGKLKLYTGEACRTGDR

SEQ ID NO: 1627 - protein, 166 aa, Homo sapiens
  EPO_E62R
APPRLICDSRVLERYLLEAKEAENITTGCAEHCSLNENITVPDTKVNFYAWKRMEVGQQAVRVWQGLALLSEAVLRGQALLVNSSQPWEPLQLHVDKAVSGLRSLTTLLRALGAQKEAISPPDAASAAPLRTITADTFRKLFRVYSNFLRGKLKLYTGEACRTGDR

SEQ ID NO: 1628 - protein, 166 aa, Homo sapiens
  EPO_W64S
APPRLICDSRVLERYLLEAKEAENITTGCAEHCSLNENITVPDTKVNFYAWKRMEVGQQAVEVSQGLALLSEAVLRGQALLVNSSQPWEPLQLHVDKAVSGLRSLTTLLRALGAQKEAISPPDAASAAPLRTITADTFRKLFRVYSNFLRGKLKLYTGEACRTGDR

SEQ ID NO: 1629 - protein, 166 aa, Homo sapiens
  EPO_W64H
APPRLICDSRVLERYLLEAKEAENITTGCAEHCSLNENITVPDTKVNFYAWKRMEVGQQAVEVHQGLALLSEAVLRGQALLVNSSQPWEPLQLHVDKAVSGLRSLTTLLRALGAQKEAISPPDAASAAPLRTITADTFRKLFRVYSNFLRGKLKLYTGEACRTGDR

SEQ ID NO: 1630 - protein, 166 aa, Homo sapiens
  EPO_W64K
APPRLICDSRVLERYLLEAKEAENITTGCAEHCSLNENITVPDTKVNFYAWKRMEVGQQAVEVKQGLALLSEAVLRGQALLVNSSQPWEPLQLHVDKAVSGLRSLTTLLRALGAQKEAISPPDAASAAPLRTITADTFRKLFRVYSNFLRGKLKLYTGEACRTGDR

SEQ ID NO: 1631 - protein, 166 aa, Homo sapiens
  EPO_W64R
APPRLICDSRVLERYLLEAKEAENITTGCAEHCSLNENITVPDTKVNFYAWKRMEVGQQAVEVRQGLALLSEAVLRGQALLVNSSQPWEPLQLHVDKAVSGLRSLTTLLRALGAQKEAISPPDAASAAPLRTITADTFRKLFRVYSNFLRGKLKLYTGEACRTGDR

SEQ ID NO: 1632 - protein, 166 aa, Homo sapiens
  EPO_Q65K
APPRLICDSRVLERYLLEAKEAENITTGCAEHCSLNENITVPDTKVNFYAWKRMEVGQQAVEVWKGLALLSEAVLRGQALLVNSSQPWEPLQLHVDKAVSGLRSLTTLLRALGAQKEAISPPDAASAAPLRTITADTFRKLFRVYSNFLRGKLKLYTGEACRTGDR

SEQ ID NO: 1633 - protein, 166 aa, Homo sapiens
  EPO_Q65R
APPRLICDSRVLERYLLEAKEAENITTGCAEHCSLNENITVPDTKVNFYAWKRMEVGQQAVEVWRGLALLSEAVLRGQALLVNSSQPWEPLQLHVDKAVSGLRSLTTLLRALGAQKEAISPPDAASAAPLRTITADTFRKLFRVYSNFLRGKLKLYTGEACRTGDR

SEQ ID NO: 1634 - protein, 166 aa, Homo sapiens
  EPO_L67I
APPRLICDSRVLERYLLEAKEAENITTGCAEHCSLNENITVPDTKVNFYAWKRMEVGQQAVEVWQGIALLSEAVLRGQALLVNSSQPWEPLQLHVDKAVSGLRSLTTLLRALGAQKEAISPPDAASAAPLRTITADTFRKLFRVYSNFLRGKLKLYTGEACRTGDR

SEQ ID NO: 1635 - protein, 166 aa, Homo sapiens
  EPO_L67V
APPRLICDSRVLERYLLEAKEAENITTGCAEHCSLNENITVPDTKVNFYAWKRMEVGQQAVEVWQGVALLSEAVLRGQALLVNSSQPWEPLQLHVDKAVSGLRSLTTLLRALGAQKEAISPPDAASAAPLRTITADTFRKLFRVYSNFLRGKLKLYTGEACRTGDR

SEQ ID NO: 1636 - protein, 166 aa, Homo sapiens
  EPO_A68K
APPRLICDSRVLERYLLEAKEAENITTGCAEHCSLNENITVPDTKVNFYAWKRMEVGQQAVEVWQGLKLLSEAVLRGQALLVNSSQPWEPLQLHVDKAVSGLRSLTTLLRALGAQKEAISPPDAASAAPLRTITADTFRKLFRVYSNFLRGKLKLYTGEACRTGDR

SEQ ID NO: 1637 - protein, 166 aa, Homo sapiens
  EPO_A68R
APPRLICDSRVLERYLLEAKEAENITTGCAEHCSLNENITVPDTKVNFYAWKRMEVGQQAVEVWQGLRLLSEAVLRGQALLVNSSQPWEPLQLHVDKAVSGLRSLTTLLRALGAQKEAISPPDAASAAPLRTITADTFRKLFRVYSNFLRGKLKLYTGEACRTGDR

SEQ ID NO: 1638 - protein, 166 aa, Homo sapiens
  EPO_L69V
APPRLICDSRVLERYLLEAKEAENITTGCAEHCSLNENITVPDTKVNFYAWKRMEVGQQAVEVWQGLAVLSEAVLRGQALLVNSSQPWEPLQLHVDKAVSGLRSLTTLLRALGAQKEAISPPDAASAAPLRTITADTFRKLFRVYSNFLRGKLKLYTGEACRTGDR

SEQ ID NO: 1639 - protein, 166 aa, Homo sapiens
  EPO_L69I
APPRLICDSRVLERYLLEAKEAENITTGCAEHCSLNENITVPDTKVNFYAWKRMEVGQQAVEVWQGLAILSEAVLRGQALLVNSSQPWEPLQLHVDKAVSGLRSLTTLLRALGAQKEAISPPDAASAAPLRTITADTFRKLFRVYSNFLRGKLKLYTGEACRTGDR

SEQ ID NO: 1640 - protein, 166 aa, Homo sapiens
  EPO_L69K
APPRLICDSRVLERYLLEAKEAENITTGCAEHCSLNENITVPDTKVNFYAWKRMEVGQQAVEVWQGLAKLSEAVLRGQALLVNSSQPWEPLQLHVDKAVSGLRSLTTLLRALGAQKEAISPPDAASAAPLRTITADTFRKLFRVYSNFLRGKLKLYTGEACRTGDR

SEQ ID NO: 1641 - protein, 166 aa, Homo sapiens
  EPO_L69R
APPRLICDSRVLERYLLEAKEAENITTGCAEHCSLNENITVPDTKVNFYAWKRMEVGQQAVEVWQGLARLSEAVLRGQALLVNSSQPWEPLQLHVDKAVSGLRSLTTLLRALGAQKEAISPPDAASAAPLRTITADTFRKLFRVYSNFLRGKLKLYTGEACRTGDR

SEQ ID NO: 1642 - protein, 166 aa, Homo sapiens
  EPO_L70I
APPRLICDSRVLERYLLEAKEAENITTGCAEHCSLNENITVPDTKVNFYAWKRMEVGQQAVEVWQGLALISEAVLRGQALLVNSSQPWEPLQLHVDKAVSGLRSLTTLLRALGAQKEAISPPDAASAAPLRTITADTFRKLFRVYSNFLRGKLKLYTGEACRTGDR

SEQ ID NO: 1643 - protein, 166 aa, Homo sapiens
  EPO_L70V
APPRLICDSRVLERYLLEAKEAENITTGCAEHCSLNENITVPDTKVNFYAWKRMEVGQQAVEVWQGLALVSEAVLRGQALLVNSSQPWEPLQLHVDKAVSGLRSLTTLLRALGAQKEAISPPDAASAAPLRTITADTFRKLFRVYSNFLRGKLKLYTGEACRTGDR

SEQ ID NO: 1644 - protein, 166 aa, Homo sapiens
  EPO_S71K
APPRLICDSRVLERYLLEAKEAENITTGCAEHCSLNENITVPDTKVNFYAWKRMEVGQQAVEVWQGLALLKEAVLRGQALLVNSSQPWEPLQLHVDKAVSGLRSLTTLLRALGAQKEAISPPDAASAAPLRTITADTFRKLFRVYSNFLRGKLKLYTGEACRTGDR

SEQ ID NO: 1645 - protein, 166 aa, Homo sapiens
  EPO_S71R
APPRLICDSRVLERYLLEAKEAENITTGCAEHCSLNENITVPDTKVNFYAWKRMEVGQQAVEVWQGLALLREAVLRGQALLVNSSQPWEPLQLHVDKAVSGLRSLTTLLRALGAQKEAISPPDAASAAPLRTITADTFRKLFRVYSNFLRGKLKLYTGEACRTGDR

SEQ ID NO: 1646 - protein, 166 aa, Homo sapiens
  EPO_E72Q
APPRLICDSRVLERYLLEAKEAENITTGCAEHCSLNENITVPDTKVNFYAWKRMEVGQQAVEVWQGLALLSQAVLRGQALLVNSSQPWEPLQLHVDKAVSGLRSLTTLLRALGAQKEAISPPDAASAAPLRTITADTFRKLFRVYSNFLRGKLKLYTGEACRTGDR

SEQ ID NO: 1647 - protein, 166 aa, Homo sapiens
  EPO_E72H
APPRLICDSRVLERYLLEAKEAENITTGCAEHCSLNENITVPDTKVNFYAWKRMEVGQQAVEVWQGLALLSHAVLRGQALLVNSSQPWEPLQLHVDKAVSGLRSLTTLLRALGAQKEAISPPDAASAAPLRTITADTFRKLFRVYSNFLRGKLKLYTGEACRTGDR

SEQ ID NO: 1648 - protein, 166 aa, Homo sapiens
  EPO_E72N
APPRLICDSRVLERYLLEAKEAENITTGCAEHCSLNENITVPDTKVNFYAWKRMEVGQQAVEVWQGLALLSNAVLRGQALLVNSSQPWEPLQLHVDKAVSGLRSLTTLLRALGAQKEAISPPDAASAAPLRTITADTFRKLFRVYSNFLRGKLKLYTGEACRTGDR

SEQ ID NO: 1649 - protein, 166 aa, Homo sapiens
  EPO_E72K
APPRLICDSRVLERYLLEAKEAENITTGCAEHCSLNENITVPDTKVNFYAWKRMEVGQQAVEVWQGLALLSKAVLRGQALLVNSSQPWEPLQLHVDKAVSGLRSLTTLLRALGAQKEAISPPDAASAAPLRTITADTFRKLFRVYSNFLRGKLKLYTGEACRTGDR

SEQ ID NO: 1650 - protein, 166 aa, Homo sapiens
  EPO_E72R
APPRLICDSRVLERYLLEAKEAENITTGCAEHCSLNENITVPDTKVNFYAWKRMEVGQQAVEVWQGLALLSRAVLRGQALLVNSSQPWEPLQLHVDKAVSGLRSLTTLLRALGAQKEAISPPDAASAAPLRTITADTFRKLFRVYSNFLRGKLKLYTGEACRTGDR

SEQ ID NO: 1651 - protein, 166 aa, Homo sapiens
  EPO_V74K
APPRLICDSRVLERYLLEAKEAENITTGCAEHCSLNENITVPDTKVNFYAWKRMEVGQQAVEVWQGLALLSEAKLRGQALLVNSSQPWEPLQLHVDKAVSGLRSLTTLLRALGAQKEAISPPDAASAAPLRTITADTFRKLFRVYSNFLRGKLKLYTGEACRTGDR

SEQ ID NO: 1652 - protein, 166 aa, Homo sapiens
  EPO_V74R
APPRLICDSRVLERYLLEAKEAENITTGCAEHCSLNENITVPDTKVNFYAWKRMEVGQQAVEVWQGLALLSEARLRGQALLVNSSQPWEPLQLHVDKAVSGLRSLTTLLRALGAQKEAISPPDAASAAPLRTITADTFRKLFRVYSNFLRGKLKLYTGEACRTGDR

SEQ ID NO: 1653 - protein, 166 aa, Homo sapiens
  EPO_L75V
APPRLICDSRVLERYLLEAKEAENITTGCAEHCSLNENITVPDTKVNFYAWKRMEVGQQAVEVWQGLALLSEAVVRGQALLVNSSQPWEPLQLHVDKAVSGLRSLTTLLRALGAQKEAISPPDAASAAPLRTITADTFRKLFRVYSNFLRGKLKLYTGEACRTGDR

SEQ ID NO: 1654 - protein, 166 aa, Homo sapiens
  EPO_L75I
APPRLICDSRVLERYLLEAKEAENITTGCAEHCSLNENITVPDTKVNFYAWKRMEVGQQAVEVWQGLALLSEAVIRGQALLVNSSQPWEPLQLHVDKAVSGLRSLTTLLRALGAQKEAISPPDAASAAPLRTITADTFRKLFRVYSNFLRGKLKLYTGEACRTGDR

SEQ ID NO: 1655 - protein, 166 aa, Homo sapiens
  EPO_L75E
APPRLICDSRVLERYLLEAKEAENITTGCAEHCSLNENITVPDTKVNFYAWKRMEVGQQAVEVWQGLALLSEAVERGQALLVNSSQPWEPLQLHVDKAVSGLRSLTTLLRALGAQKEAISPPDAASAAPLRTITADTFRKLFRVYSNFLRGKLKLYTGEACRTGDR

SEQ ID NO: 1656 - protein, 166 aa, Homo sapiens
  EPO_L75D
APPRLICDSRVLERYLLEAKEAENITTGCAEHCSLNENITVPDTKVNFYAWKRMEVGQQAVEVWQGLALLSEAVDRGQALLVNSSQPWEPLQLHVDKAVSGLRSLTTLLRALGAQKEAISPPDAASAAPLRTITADTFRKLFRVYSNFLRGKLKLYTGEACRTGDR

SEQ ID NO: 1657 - protein, 166 aa, Homo sapiens
  EPO_L75K
APPRLICDSRVLERYLLEAKEAENITTGCAEHCSLNENITVPDTKVNFYAWKRMEVGQQAVEVWQGLALLSEAVKRGQALLVNSSQPWEPLQLHVDKAVSGLRSLTTLLRALGAQKEAISPPDAASAAPLRTITADTFRKLFRVYSNFLRGKLKLYTGEACRTGDR

SEQ ID NO: 1658 - protein, 166 aa, Homo sapiens
  EPO_L75R
APPRLICDSRVLERYLLEAKEAENITTGCAEHCSLNENITVPDTKVNFYAWKRMEVGQQAVEVWQGLALLSEAVRRGQALLVNSSQPWEPLQLHVDKAVSGLRSLTTLLRALGAQKEAISPPDAASAAPLRTITADTFRKLFRVYSNFLRGKLKLYTGEACRTGDR

SEQ ID NO: 1659 - protein, 166 aa, Homo sapiens
  EPO_R76H
APPRLICDSRVLERYLLEAKEAENITTGCAEHCSLNENITVPDTKVNFYAWKRMEVGQQAVEVWQGLALLSEAVLHGQALLVNSSQPWEPLQLHVDKAVSGLRSLTTLLRALGAQKEAISPPDAASAAPLRTITADTFRKLFRVYSNFLRGKLKLYTGEACRTGDR

SEQ ID NO: 1660 - protein, 166 aa, Homo sapiens
  EPO_R76Q
APPRLICDSRVLERYLLEAKEAENITTGCAEHCSLNENITVPDTKVNFYAWKRMEVGQQAVEVWQGLALLSEAVLQGQALLVNSSQPWEPLQLHVDKAVSGLRSLTTLLRALGAQKEAISPPDAASAAPLRTITADTFRKLFRVYSNFLRGKLKLYTGEACRTGDR

SEQ ID NO: 1661 - protein, 166 aa, Homo sapiens
  EPO_Q78E
APPRLICDSRVLERYLLEAKEAENITTGCAEHCSLNENITVPDTKVNFYAWKRMEVGQQAVEVWQGLALLSEAVLRGEALLVNSSQPWEPLQLHVDKAVSGLRSLTTLLRALGAQKEAISPPDAASAAPLRTITADTFRKLFRVYSNFLRGKLKLYTGEACRTGDR

SEQ ID NO: 1662 - protein, 166 aa, Homo sapiens
  EPO_Q78D
APPRLICDSRVLERYLLEAKEAENITTGCAEHCSLNENITVPDTKVNFYAWKRMEVGQQAVEVWQGLALLSEAVLRGDALLVNSSQPWEPLQLHVDKAVSGLRSLTTLLRALGAQKEAISPPDAASAAPLRTITADTFRKLFRVYSNFLRGKLKLYTGEACRTGDR

SEQ ID NO: 1663 - protein, 166 aa, Homo sapiens
  EPO_Q78K
APPRLICDSRVLERYLLEAKEAENITTGCAEHCSLNENITVPDTKVNFYAWKRMEVGQQAVEVWQGLALLSEAVLRGKALLVNSSQPWEPLQLHVDKAVSGLRSLTTLLRALGAQKEAISPPDAASAAPLRTITADTFRKLFRVYSNFLRGKLKLYTGEACRTGDR

SEQ ID NO: 1664 - protein, 166 aa, Homo sapiens
  EPO_Q78R
APPRLICDSRVLERYLLEAKEAENITTGCAEHCSLNENITVPDTKVNFYAWKRMEVGQQAVEVWQGLALLSEAVLRGRALLVNSSQPWEPLQLHVDKAVSGLRSLTTLLRALGAQKEAISPPDAASAAPLRTITADTFRKLFRVYSNFLRGKLKLYTGEACRTGDR

SEQ ID NO: 1665 - protein, 166 aa, Homo sapiens
  EPO_A79K
APPRLICDSRVLERYLLEAKEAENITTGCAEHCSLNENITVPDTKVNFYAWKRMEVGQQAVEVWQGLALLSEAVLRGQKLLVNSSQPWEPLQLHVDKAVSGLRSLTTLLRALGAQKEAISPPDAASAAPLRTITADTFRKLFRVYSNFLRGKLKLYTGEACRTGDR

SEQ ID NO: 1666 - protein, 166 aa, Homo sapiens
  EPO_A79R
APPRLICDSRVLERYLLEAKEAENITTGCAEHCSLNENITVPDTKVNFYAWKRMEVGQQAVEVWQGLALLSEAVLRGQRLLVNSSQPWEPLQLHVDKAVSGLRSLTTLLRALGAQKEAISPPDAASAAPLRTITADTFRKLFRVYSNFLRGKLKLYTGEACRTGDR

SEQ ID NO: 1667 - protein, 166 aa, Homo sapiens
  EPO_L80V
APPRLICDSRVLERYLLEAKEAENITTGCAEHCSLNENITVPDTKVNFYAWKRMEVGQQAVEVWQGLALLSEAVLRGQAVLVNSSQPWEPLQLHVDKAVSGLRSLTTLLRALGAQKEAISPPDAASAAPLRTITADTFRKLFRVYSNFLRGKLKLYTGEACRTGDR

SEQ ID NO: 1668 - protein, 166 aa, Homo sapiens
  EPO_L80I
APPRLICDSRVLERYLLEAKEAENITTGCAEHCSLNENITVPDTKVNFYAWKRMEVGQQAVEVWQGLALLSEAVLRGQAILVNSSQPWEPLQLHVDKAVSGLRSLTTLLRALGAQKEAISPPDAASAAPLRTITADTFRKLFRVYSNFLRGKLKLYTGEACRTGDR

SEQ ID NO: 1669 - protein, 166 aa, Homo sapiens
  EPO_L80K
APPRLICDSRVLERYLLEAKEAENITTGCAEHCSLNENITVPDTKVNFYAWKRMEVGQQAVEVWQGLALLSEAVLRGQAKLVNSSQPWEPLQLHVDKAVSGLRSLTTLLRALGAQKEAISPPDAASAAPLRTITADTFRKLFRVYSNFLRGKLKLYTGEACRTGDR

SEQ ID NO: 1670 - protein, 166 aa, Homo sapiens
  EPO_L80R
APPRLICDSRVLERYLLEAKEAENITTGCAEHCSLNENITVPDTKVNFYAWKRMEVGQQAVEVWQGLALLSEAVLRGQARLVNSSQPWEPLQLHVDKAVSGLRSLTTLLRALGAQKEAISPPDAASAAPLRTITADTFRKLFRVYSNFLRGKLKLYTGEACRTGDR

SEQ ID NO: 1671 - protein, 166 aa, Homo sapiens
  EPO_L81I
APPRLICDSRVLERYLLEAKEAENITTGCAEHCSLNENITVPDTKVNFYAWKRMEVGQQAVEVWQGLALLSEAVLRGQALIVNSSQPWEPLQLHVDKAVSGLRSLTTLLRALGAQKEAISPPDAASAAPLRTITADTFRKLFRVYSNFLRGKLKLYTGEACRTGDR

SEQ ID NO: 1672 - protein, 166 aa, Homo sapiens
  EPO_L81V
APPRLICDSRVLERYLLEAKEAENITTGCAEHCSLNENITVPDTKVNFYAWKRMEVGQQAVEVWQGLALLSEAVLRGQALVVNSSQPWEPLQLHVDKAVSGLRSLTTLLRALGAQKEAISPPDAASAAPLRTITADTFRKLFRVYSNFLRGKLKLYTGEACRTGDR

SEQ ID NO: 1673 - protein, 166 aa, Homo sapiens
  EPO_V82E
APPRLICDSRVLERYLLEAKEAENITTGCAEHCSLNENITVPDTKVNFYAWKRMEVGQQAVEVWQGLALLSEAVLRGQALLENSSQPWEPLQLHVDKAVSGLRSLTTLLRALGAQKEAISPPDAASAAPLRTITADTFRKLFRVYSNFLRGKLKLYTGEACRTGDR

SEQ ID NO: 1674 - protein, 166 aa, Homo sapiens
  EPO_V82D
APPRLICDSRVLERYLLEAKEAENITTGCAEHCSLNENITVPDTKVNFYAWKRMEVGQQAVEVWQGLALLSEAVLRGQALLDNSSQPWEPLQLHVDKAVSGLRSLTTLLRALGAQKEAISPPDAASAAPLRTITADTFRKLFRVYSNFLRGKLKLYTGEACRTGDR

SEQ ID NO: 1675 - protein, 166 aa, Homo sapiens
  EPO_V82K
APPRLICDSRVLERYLLEAKEAENITTGCAEHCSLNENITVPDTKVNFYAWKRMEVGQQAVEVWQGLALLSEAVLRGQALLKNSSQPWEPLQLHVDKAVSGLRSLTTLLRALGAQKEAISPPDAASAAPLRTITADTFRKLFRVYSNFLRGKLKLYTGEACRTGDR

SEQ ID NO: 1676 - protein, 166 aa, Homo sapiens
  EPO_V82R
APPRLICDSRVLERYLLEAKEAENITTGCAEHCSLNENITVPDTKVNFYAWKRMEVGQQAVEVWQGLALLSEAVLRGQALLRNSSQPWEPLQLHVDKAVSGLRSLTTLLRALGAQKEAISPPDAASAAPLRTITADTFRKLFRVYSNFLRGKLKLYTGEACRTGDR

SEQ ID NO: 1677 - protein, 166 aa, Homo sapiens
  EPO_S84E
APPRLICDSRVLERYLLEAKEAENITTGCAEHCSLNENITVPDTKVNFYAWKRMEVGQQAVEVWQGLALLSEAVLRGQALLVNESQPWEPLQLHVDKAVSGLRSLTTLLRALGAQKEAISPPDAASAAPLRTITADTFRKLFRVYSNFLRGKLKLYTGEACRTGDR

SEQ ID NO: 1678 - protein, 166 aa, Homo sapiens
  EPO_S84D
APPRLICDSRVLERYLLEAKEAENITTGCAEHCSLNENITVPDTKVNFYAWKRMEVGQQAVEVWQGLALLSEAVLRGQALLVNDSQPWEPLQLHVDKAVSGLRSLTTLLRALGAQKEAISPPDAASAAPLRTITADTFRKLFRVYSNFLRGKLKLYTGEACRTGDR

SEQ ID NO: 1679 - protein, 166 aa, Homo sapiens
  EPO_S84K
APPRLICDSRVLERYLLEAKEAENITTGCAEHCSLNENITVPDTKVNFYAWKRMEVGQQAVEVWQGLALLSEAVLRGQALLVNKSQPWEPLQLHVDKAVSGLRSLTTLLRALGAQKEAISPPDAASAAPLRTITADTFRKLFRVYSNFLRGKLKLYTGEACRTGDR

SEQ ID NO: 1680 - protein, 166 aa, Homo sapiens
  EPO_S84R
APPRLICDSRVLERYLLEAKEAENITTGCAEHCSLNENITVPDTKVNFYAWKRMEVGQQAVEVWQGLALLSEAVLRGQALLVNRSQPWEPLQLHVDKAVSGLRSLTTLLRALGAQKEAISPPDAASAAPLRTITADTFRKLFRVYSNFLRGKLKLYTGEACRTGDR

SEQ ID NO: 1681 - protein, 166 aa, Homo sapiens
  EPO_S85D
APPRLICDSRVLERYLLEAKEAENITTGCAEHCSLNENITVPDTKVNFYAWKRMEVGQQAVEVWQGLALLSEAVLRGQALLVNSDQPWEPLQLHVDKAVSGLRSLTTLLRALGAQKEAISPPDAASAAPLRTITADTFRKLFRVYSNFLRGKLKLYTGEACRTGDR

SEQ ID NO: 1682 - protein, 166 aa, Homo sapiens
  EPO_S85K
APPRLICDSRVLERYLLEAKEAENITTGCAEHCSLNENITVPDTKVNFYAWKRMEVGQQAVEVWQGLALLSEAVLRGQALLVNSKQPWEPLQLHVDKAVSGLRSLTTLLRALGAQKEAISPPDAASAAPLRTITADTFRKLFRVYSNFLRGKLKLYTGEACRTGDR

SEQ ID NO: 1683 - protein, 166 aa, Homo sapiens
  EPO_S85R
APPRLICDSRVLERYLLEAKEAENITTGCAEHCSLNENITVPDTKVNFYAWKRMEVGQQAVEVWQGLALLSEAVLRGQALLVNSRQPWEPLQLHVDKAVSGLRSLTTLLRALGAQKEAISPPDAASAAPLRTITADTFRKLFRVYSNFLRGKLKLYTGEACRTGDR

SEQ ID NO: 1684 - protein, 166 aa, Homo sapiens
  EPO_Q86E
APPRLICDSRVLERYLLEAKEAENITTGCAEHCSLNENITVPDTKVNFYAWKRMEVGQQAVEVWQGLALLSEAVLRGQALLVNSSEPWEPLQLHVDKAVSGLRSLTTLLRALGAQKEAISPPDAASAAPLRTITADTFRKLFRVYSNFLRGKLKLYTGEACRTGDR

SEQ ID NO: 1685 - protein, 166 aa, Homo sapiens
  EPO_Q86D
APPRLICDSRVLERYLLEAKEAENITTGCAEHCSLNENITVPDTKVNFYAWKRMEVGQQAVEVWQGLALLSEAVLRGQALLVNSSDPWEPLQLHVDKAVSGLRSLTTLLRALGAQKEAISPPDAASAAPLRTITADTFRKLFRVYSNFLRGKLKLYTGEACRTGDR

SEQ ID NO: 1686 - protein, 166 aa, Homo sapiens
  EPO_Q86K
APPRLICDSRVLERYLLEAKEAENITTGCAEHCSLNENITVPDTKVNFYAWKRMEVGQQAVEVWQGLALLSEAVLRGQALLVNSSKPWEPLQLHVDKAVSGLRSLTTLLRALGAQKEAISPPDAASAAPLRTITADTFRKLFRVYSNFLRGKLKLYTGEACRTGDR

SEQ ID NO: 1687 - protein, 166 aa, Homo sapiens
  EPO_Q86R
APPRLICDSRVLERYLLEAKEAENITTGCAEHCSLNENITVPDTKVNFYAWKRMEVGQQAVEVWQGLALLSEAVLRGQALLVNSSRPWEPLQLHVDKAVSGLRSLTTLLRALGAQKEAISPPDAASAAPLRTITADTFRKLFRVYSNFLRGKLKLYTGEACRTGDR

SEQ ID NO: 1688 - protein, 166 aa, Homo sapiens
  EPO_P87S
APPRLICDSRVLERYLLEAKEAENITTGCAEHCSLNENITVPDTKVNFYAWKRMEVGQQAVEVWQGLALLSEAVLRGQALLVNSSQSWEPLQLHVDKAVSGLRSLTTLLRALGAQKEAISPPDAASAAPLRTITADTFRKLFRVYSNFLRGKLKLYTGEACRTGDR

SEQ ID NO: 1689 - protein, 166 aa, Homo sapiens
  EPO_P87A
APPRLICDSRVLERYLLEAKEAENITTGCAEHCSLNENITVPDTKVNFYAWKRMEVGQQAVEVWQGLALLSEAVLRGQALLVNSSQAWEPLQLHVDKAVSGLRSLTTLLRALGAQKEAISPPDAASAAPLRTITADTFRKLFRVYSNFLRGKLKLYTGEACRTGDR

SEQ ID NO: 1690 - protein, 166 aa, Homo sapiens
  EPO_P87K
APPRLICDSRVLERYLLEAKEAENITTGCAEHCSLNENITVPDTKVNFYAWKRMEVGQQAVEVWQGLALLSEAVLRGQALLVNSSQKWEPLQLHVDKAVSGLRSLTTLLRALGAQKEAISPPDAASAAPLRTITADTFRKLFRVYSNFLRGKLKLYTGEACRTGDR

SEQ ID NO: 1691 - protein, 166 aa, Homo sapiens
  EPO_P87R
APPRLICDSRVLERYLLEAKEAENITTGCAEHCSLNENITVPDTKVNFYAWKRMEVGQQAVEVWQGLALLSEAVLRGQALLVNSSQRWEPLQLHVDKAVSGLRSLTTLLRALGAQKEAISPPDAASAAPLRTITADTFRKLFRVYSNFLRGKLKLYTGEACRTGDR

SEQ ID NO: 1692 - protein, 166 aa, Homo sapiens
  EPO_W88S
APPRLICDSRVLERYLLEAKEAENITTGCAEHCSLNENITVPDTKVNFYAWKRMEVGQQAVEVWQGLALLSEAVLRGQALLVNSSQPSEPLQLHVDKAVSGLRSLTTLLRALGAQKEAISPPDAASAAPLRTITADTFRKLFRVYSNFLRGKLKLYTGEACRTGDR

SEQ ID NO: 1693 - protein, 166 aa, Homo sapiens
  EPO_W88H
APPRLICDSRVLERYLLEAKEAENITTGCAEHCSLNENITVPDTKVNFYAWKRMEVGQQAVEVWQGLALLSEAVLRGQALLVNSSQPHEPLQLHVDKAVSGLRSLTTLLRALGAQKEAISPPDAASAAPLRTITADTFRKLFRVYSNFLRGKLKLYTGEACRTGDR

SEQ ID NO: 1694 - protein, 166 aa, Homo sapiens
  EPO_W88E
APPRLICDSRVLERYLLEAKEAENITTGCAEHCSLNENITVPDTKVNFYAWKRMEVGQQAVEVWQGLALLSEAVLRGQALLVNSSQPEEPLQLHVDKAVSGLRSLTTLLRALGAQKEAISPPDAASAAPLRTITADTFRKLFRVYSNFLRGKLKLYTGEACRTGDR

SEQ ID NO: 1695 - protein, 166 aa, Homo sapiens
  EPO_W88D
APPRLICDSRVLERYLLEAKEAENITTGCAEHCSLNENITVPDTKVNFYAWKRMEVGQQAVEVWQGLALLSEAVLRGQALLVNSSQPDEPLQLHVDKAVSGLRSLTTLLRALGAQKEAISPPDAASAAPLRTITADTFRKLFRVYSNFLRGKLKLYTGEACRTGDR

SEQ ID NO: 1696 - protein, 166 aa, Homo sapiens
  EPO_W88K
APPRLICDSRVLERYLLEAKEAENITTGCAEHCSLNENITVPDTKVNFYAWKRMEVGQQAVEVWQGLALLSEAVLRGQALLVNSSQPKEPLQLHVDKAVSGLRSLTTLLRALGAQKEAISPPDAASAAPLRTITADTFRKLFRVYSNFLRGKLKLYTGEACRTGDR

SEQ ID NO: 1697 - protein, 166 aa, Homo sapiens
  EPO_W88R
APPRLICDSRVLERYLLEAKEAENITTGCAEHCSLNENITVPDTKVNFYAWKRMEVGQQAVEVWQGLALLSEAVLRGQALLVNSSQPREPLQLHVDKAVSGLRSLTTLLRALGAQKEAISPPDAASAAPLRTITADTFRKLFRVYSNFLRGKLKLYTGEACRTGDR

SEQ ID NO: 1698 - protein, 166 aa, Homo sapiens
  EPO_E89Q
APPRLICDSRVLERYLLEAKEAENITTGCAEHCSLNENITVPDTKVNFYAWKRMEVGQQAVEVWQGLALLSEAVLRGQALLVNSSQPWQPLQLHVDKAVSGLRSLTTLLRALGAQKEAISPPDAASAAPLRTITADTFRKLFRVYSNFLRGKLKLYTGEACRTGDR

SEQ ID NO: 1699 - protein, 166 aa, Homo sapiens
  EPO_E89H
APPRLICDSRVLERYLLEAKEAENITTGCAEHCSLNENITVPDTKVNFYAWKRMEVGQQAVEVWQGLALLSEAVLRGQALLVNSSQPWHPLQLHVDKAVSGLRSLTTLLRALGAQKEAISPPDAASAAPLRTITADTFRKLFRVYSNFLRGKLKLYTGEACRTGDR

SEQ ID NO: 1700 - protein, 166 aa, Homo sapiens
  EPO_E89N
APPRLICDSRVLERYLLEAKEAENITTGCAEHCSLNENITVPDTKVNFYAWKRMEVGQQAVEVWQGLALLSEAVLRGQALLVNSSQPWNPLQLHVDKAVSGLRSLTTLLRALGAQKEAISPPDAASAAPLRTITADTFRKLFRVYSNFLRGKLKLYTGEACRTGDR

SEQ ID NO: 1701 - protein, 166 aa, Homo sapiens
  EPO_E89K
APPRLICDSRVLERYLLEAKEAENITTGCAEHCSLNENITVPDTKVNFYAWKRMEVGQQAVEVWQGLALLSEAVLRGQALLVNSSQPWKPLQLHVDKAVSGLRSLTTLLRALGAQKEAISPPDAASAAPLRTITADTFRKLFRVYSNFLRGKLKLYTGEACRTGDR

SEQ ID NO: 1702 - protein, 166 aa, Homo sapiens
  EPO_E89R
APPRLICDSRVLERYLLEAKEAENITTGCAEHCSLNENITVPDTKVNFYAWKRMEVGQQAVEVWQGLALLSEAVLRGQALLVNSSQPWRPLQLHVDKAVSGLRSLTTLLRALGAQKEAISPPDAASAAPLRTITADTFRKLFRVYSNFLRGKLKLYTGEACRTGDR

SEQ ID NO: 1703 - protein, 166 aa, Homo sapiens
  EPO_P90S
APPRLICDSRVLERYLLEAKEAENITTGCAEHCSLNENITVPDTKVNFYAWKRMEVGQQAVEVWQGLALLSEAVLRGQALLVNSSQPWESLQLHVDKAVSGLRSLTTLLRALGAQKEAISPPDAASAAPLRTITADTFRKLFRVYSNFLRGKLKLYTGEACRTGDR

SEQ ID NO: 1704 - protein, 166 aa, Homo sapiens
  EPO_P90A
APPRLICDSRVLERYLLEAKEAENITTGCAEHCSLNENITVPDTKVNFYAWKRMEVGQQAVEVWQGLALLSEAVLRGQALLVNSSQPWEALQLHVDKAVSGLRSLTTLLRALGAQKEAISPPDAASAAPLRTITADTFRKLFRVYSNFLRGKLKLYTGEACRTGDR

SEQ ID NO: 1705 - protein, 166 aa, Homo sapiens
  EPO_P90K
APPRLICDSRVLERYLLEAKEAENITTGCAEHCSLNENITVPDTKVNFYAWKRMEVGQQAVEVWQGLALLSEAVLRGQALLVNSSQPWEKLQLHVDKAVSGLRSLTTLLRALGAQKEAISPPDAASAAPLRTITADTFRKLFRVYSNFLRGKLKLYTGEACRTGDR

SEQ ID NO: 1706 - protein, 166 aa, Homo sapiens
  EPO_P90R
APPRLICDSRVLERYLLEAKEAENITTGCAEHCSLNENITVPDTKVNFYAWKRMEVGQQAVEVWQGLALLSEAVLRGQALLVNSSQPWERLQLHVDKAVSGLRSLTTLLRALGAQKEAISPPDAASAAPLRTITADTFRKLFRVYSNFLRGKLKLYTGEACRTGDR

SEQ ID NO: 1707 - protein, 166 aa, Homo sapiens
  EPO_L91I
APPRLICDSRVLERYLLEAKEAENITTGCAEHCSLNENITVPDTKVNFYAWKRMEVGQQAVEVWQGLALLSEAVLRGQALLVNSSQPWEPIQLHVDKAVSGLRSLTTLLRALGAQKEAISPPDAASAAPLRTITADTFRKLFRVYSNFLRGKLKLYTGEACRTGDR

SEQ ID NO: 1708 - protein, 166 aa, Homo sapiens
  EPO_L91V
APPRLICDSRVLERYLLEAKEAENITTGCAEHCSLNENITVPDTKVNFYAWKRMEVGQQAVEVWQGLALLSEAVLRGQALLVNSSQPWEPVQLHVDKAVSGLRSLTTLLRALGAQKEAISPPDAASAAPLRTITADTFRKLFRVYSNFLRGKLKLYTGEACRTGDR

SEQ ID NO: 1709 - protein, 166 aa, Homo sapiens
  EPO_L91K
APPRLICDSRVLERYLLEAKEAENITTGCAEHCSLNENITVPDTKVNFYAWKRMEVGQQAVEVWQGLALLSEAVLRGQALLVNSSQPWEPKQLHVDKAVSGLRSLTTLLRALGAQKEAISPPDAASAAPLRTITADTFRKLFRVYSNFLRGKLKLYTGEACRTGDR

SEQ ID NO: 1710 - protein, 166 aa, Homo sapiens
  EPO_L91R
APPRLICDSRVLERYLLEAKEAENITTGCAEHCSLNENITVPDTKVNFYAWKRMEVGQQAVEVWQGLALLSEAVLRGQALLVNSSQPWEPRQLHVDKAVSGLRSLTTLLRALGAQKEAISPPDAASAAPLRTITADTFRKLFRVYSNFLRGKLKLYTGEACRTGDR

SEQ ID NO: 1711 - protein, 166 aa, Homo sapiens
  EPO_Q92E
APPRLICDSRVLERYLLEAKEAENITTGCAEHCSLNENITVPDTKVNFYAWKRMEVGQQAVEVWQGLALLSEAVLRGQALLVNSSQPWEPLELHVDKAVSGLRSLTTLLRALGAQKEAISPPDAASAAPLRTITADTFRKLFRVYSNFLRGKLKLYTGEACRTGDR

SEQ ID NO: 1712 - protein, 166 aa, Homo sapiens
  EPO_Q92D
APPRLICDSRVLERYLLEAKEAENITTGCAEHCSLNENITVPDTKVNFYAWKRMEVGQQAVEVWQGLALLSEAVLRGQALLVNSSQPWEPLDLHVDKAVSGLRSLTTLLRALGAQKEAISPPDAASAAPLRTITADTFRKLFRVYSNFLRGKLKLYTGEACRTGDR

SEQ ID NO: 1713 - protein, 166 aa, Homo sapiens
  EPO_Q92K
APPRLICDSRVLERYLLEAKEAENITTGCAEHCSLNENITVPDTKVNFYAWKRMEVGQQAVEVWQGLALLSEAVLRGQALLVNSSQPWEPLKLHVDKAVSGLRSLTTLLRALGAQKEAISPPDAASAAPLRTITADTFRKLFRVYSNFLRGKLKLYTGEACRTGDR

SEQ ID NO: 1714 - protein, 166 aa, Homo sapiens
  EPO_Q92R
APPRLICDSRVLERYLLEAKEAENITTGCAEHCSLNENITVPDTKVNFYAWKRMEVGQQAVEVWQGLALLSEAVLRGQALLVNSSQPWEPLRLHVDKAVSGLRSLTTLLRALGAQKEAISPPDAASAAPLRTITADTFRKLFRVYSNFLRGKLKLYTGEACRTGDR

SEQ ID NO: 1715 - protein, 166 aa, Homo sapiens
  EPO_L93V
APPRLICDSRVLERYLLEAKEAENITTGCAEHCSLNENITVPDTKVNFYAWKRMEVGQQAVEVWQGLALLSEAVLRGQALLVNSSQPWEPLQVHVDKAVSGLRSLTTLLRALGAQKEAISPPDAASAAPLRTITADTFRKLFRVYSNFLRGKLKLYTGEACRTGDR

SEQ ID NO: 1716 - protein, 166 aa, Homo sapiens
  EPO_L93I
APPRLICDSRVLERYLLEAKEAENITTGCAEHCSLNENITVPDTKVNFYAWKRMEVGQQAVEVWQGLALLSEAVLRGQALLVNSSQPWEPLQIHVDKAVSGLRSLTTLLRALGAQKEAISPPDAASAAPLRTITADTFRKLFRVYSNFLRGKLKLYTGEACRTGDR

SEQ ID NO: 1717 - protein, 166 aa, Homo sapiens
  EPO_L93E
APPRLICDSRVLERYLLEAKEAENITTGCAEHCSLNENITVPDTKVNFYAWKRMEVGQQAVEVWQGLALLSEAVLRGQALLVNSSQPWEPLQEHVDKAVSGLRSLTTLLRALGAQKEAISPPDAASAAPLRTITADTFRKLFRVYSNFLRGKLKLYTGEACRTGDR

SEQ ID NO: 1718 - protein, 166 aa, Homo sapiens
  EPO_L93D
APPRLICDSRVLERYLLEAKEAENITTGCAEHCSLNENITVPDTKVNFYAWKRMEVGQQAVEVWQGLALLSEAVLRGQALLVNSSQPWEPLQDHVDKAVSGLRSLTTLLRALGAQKEAISPPDAASAAPLRTITADTFRKLFRVYSNFLRGKLKLYTGEACRTGDR

SEQ ID NO: 1719 - protein, 166 aa, Homo sapiens
  EPO_L93K
APPRLICDSRVLERYLLEAKEAENITTGCAEHCSLNENITVPDTKVNFYAWKRMEVGQQAVEVWQGLALLSEAVLRGQALLVNSSQPWEPLQKHVDKAVSGLRSLTTLLRALGAQKEAISPPDAASAAPLRTITADTFRKLFRVYSNFLRGKLKLYTGEACRTGDR

SEQ ID NO: 1720 - protein, 166 aa, Homo sapiens
  EPO_L93R
APPRLICDSRVLERYLLEAKEAENITTGCAEHCSLNENITVPDTKVNFYAWKRMEVGQQAVEVWQGLALLSEAVLRGQALLVNSSQPWEPLQRHVDKAVSGLRSLTTLLRALGAQKEAISPPDAASAAPLRTITADTFRKLFRVYSNFLRGKLKLYTGEACRTGDR

SEQ ID NO: 1721 - protein, 166 aa, Homo sapiens
  EPO_H94K
APPRLICDSRVLERYLLEAKEAENITTGCAEHCSLNENITVPDTKVNFYAWKRMEVGQQAVEVWQGLALLSEAVLRGQALLVNSSQPWEPLQLKVDKAVSGLRSLTTLLRALGAQKEAISPPDAASAAPLRTITADTFRKLFRVYSNFLRGKLKLYTGEACRTGDR

SEQ ID NO: 1722 - protein, 166 aa, Homo sapiens
  EPO_H94R
APPRLICDSRVLERYLLEAKEAENITTGCAEHCSLNENITVPDTKVNFYAWKRMEVGQQAVEVWQGLALLSEAVLRGQALLVNSSQPWEPLQLRVDKAVSGLRSLTTLLRALGAQKEAISPPDAASAAPLRTITADTFRKLFRVYSNFLRGKLKLYTGEACRTGDR

SEQ ID NO: 1723 - protein, 166 aa, Homo sapiens
  EPO_V95K
APPRLICDSRVLERYLLEAKEAENITTGCAEHCSLNENITVPDTKVNFYAWKRMEVGQQAVEVWQGLALLSEAVLRGQALLVNSSQPWEPLQLHKDKAVSGLRSLTTLLRALGAQKEAISPPDAASAAPLRTITADTFRKLFRVYSNFLRGKLKLYTGEACRTGDR

SEQ ID NO: 1724 - protein, 166 aa, Homo sapiens
  EPO_V95R
APPRLICDSRVLERYLLEAKEAENITTGCAEHCSLNENITVPDTKVNFYAWKRMEVGQQAVEVWQGLALLSEAVLRGQALLVNSSQPWEPLQLHRDKAVSGLRSLTTLLRALGAQKEAISPPDAASAAPLRTITADTFRKLFRVYSNFLRGKLKLYTGEACRTGDR

SEQ ID NO: 1725 - protein, 166 aa, Homo sapiens
  EPO_D96Q
APPRLICDSRVLERYLLEAKEAENITTGCAEHCSLNENITVPDTKVNFYAWKRMEVGQQAVEVWQGLALLSEAVLRGQALLVNSSQPWEPLQLHVQKAVSGLRSLTTLLRALGAQKEAISPPDAASAAPLRTITADTFRKLFRVYSNFLRGKLKLYTGEACRTGDR

SEQ ID NO: 1726 - protein, 166 aa, Homo sapiens
  EPO_D96H
APPRLICDSRVLERYLLEAKEAENITTGCAEHCSLNENITVPDTKVNFYAWKRMEVGQQAVEVWQGLALLSEAVLRGQALLVNSSQPWEPLQLHVHKAVSGLRSLTTLLRALGAQKEAISPPDAASAAPLRTITADTFRKLFRVYSNFLRGKLKLYTGEACRTGDR

SEQ ID NO: 1727 - protein, 166 aa, Homo sapiens
  EPO_D96N
APPRLICDSRVLERYLLEAKEAENITTGCAEHCSLNENITVPDTKVNFYAWKRMEVGQQAVEVWQGLALLSEAVLRGQALLVNSSQPWEPLQLHVNKAVSGLRSLTTLLRALGAQKEAISPPDAASAAPLRTITADTFRKLFRVYSNFLRGKLKLYTGEACRTGDR

SEQ ID NO: 1728 - protein, 166 aa, Homo sapiens
  EPO_K97Q
APPRLICDSRVLERYLLEAKEAENITTGCAEHCSLNENITVPDTKVNFYAWKRMEVGQQAVEVWQGLALLSEAVLRGQALLVNSSQPWEPLQLHVDQAVSGLRSLTTLLRALGAQKEAISPPDAASAAPLRTITADTFRKLFRVYSNFLRGKLKLYTGEACRTGDR

SEQ ID NO: 1729 - protein, 166 aa, Homo sapiens
  EPO_K97T
APPRLICDSRVLERYLLEAKEAENITTGCAEHCSLNENITVPDTKVNFYAWKRMEVGQQAVEVWQGLALLSEAVLRGQALLVNSSQPWEPLQLHVDTAVSGLRSLTTLLRALGAQKEAISPPDAASAAPLRTITADTFRKLFRVYSNFLRGKLKLYTGEACRTGDR

SEQ ID NO: 1730 - protein, 166 aa, Homo sapiens
  EPO_K97N
APPRLICDSRVLERYLLEAKEAENITTGCAEHCSLNENITVPDTKVNFYAWKRMEVGQQAVEVWQGLALLSEAVLRGQALLVNSSQPWEPLQLHVDNAVSGLRSLTTLLRALGAQKEAISPPDAASAAPLRTITADTFRKLFRVYSNFLRGKLKLYTGEACRTGDR

SEQ ID NO: 1731 - protein, 166 aa, Homo sapiens
  EPO_L102V
APPRLICDSRVLERYLLEAKEAENITTGCAEHCSLNENITVPDTKVNFYAWKRMEVGQQAVEVWQGLALLSEAVLRGQALLVNSSQPWEPLQLHVDKAVSGVRSLTTLLRALGAQKEAISPPDAASAAPLRTITADTFRKLFRVYSNFLRGKLKLYTGEACRTGDR

SEQ ID NO: 1732 - protein, 166 aa, Homo sapiens
  EPO_L102I
APPRLICDSRVLERYLLEAKEAENITTGCAEHCSLNENITVPDTKVNFYAWKRMEVGQQAVEVWQGLALLSEAVLRGQALLVNSSQPWEPLQLHVDKAVSGIRSLTTLLRALGAQKEAISPPDAASAAPLRTITADTFRKLFRVYSNFLRGKLKLYTGEACRTGDR

SEQ ID NO: 1733 - protein, 166 aa, Homo sapiens
  EPO_R103H
APPRLICDSRVLERYLLEAKEAENITTGCAEHCSLNENITVPDTKVNFYAWKRMEVGQQAVEVWQGLALLSEAVLRGQALLVNSSQPWEPLQLHVDKAVSGLHSLTTLLRALGAQKEAISPPDAASAAPLRTITADTFRKLFRVYSNFLRGKLKLYTGEACRTGDR

SEQ ID NO: 1734 - protein, 166 aa, Homo sapiens
  EPO_R103Q
APPRLICDSRVLERYLLEAKEAENITTGCAEHCSLNENITVPDTKVNFYAWKRMEVGQQAVEVWQGLALLSEAVLRGQALLVNSSQPWEPLQLHVDKAVSGLQSLTTLLRALGAQKEAISPPDAASAAPLRTITADTFRKLFRVYSNFLRGKLKLYTGEACRTGDR

SEQ ID NO: 1735 - protein, 166 aa, Homo sapiens
  EPO_L105I
APPRLICDSRVLERYLLEAKEAENITTGCAEHCSLNENITVPDTKVNFYAWKRMEVGQQAVEVWQGLALLSEAVLRGQALLVNSSQPWEPLQLHVDKAVSGLRSITTLLRALGAQKEAISPPDAASAAPLRTITADTFRKLFRVYSNFLRGKLKLYTGEACRTGDR

SEQ ID NO: 1736 - protein, 166 aa, Homo sapiens
  EPO_L105V
APPRLICDSRVLERYLLEAKEAENITTGCAEHCSLNENITVPDTKVNFYAWKRMEVGQQAVEVWQGLALLSEAVLRGQALLVNSSQPWEPLQLHVDKAVSGLRSVTTLLRALGAQKEAISPPDAASAAPLRTITADTFRKLFRVYSNFLRGKLKLYTGEACRTGDR

SEQ ID NO: 1737 - protein, 166 aa, Homo sapiens
  EPO_L108I
APPRLICDSRVLERYLLEAKEAENITTGCAEHCSLNENITVPDTKVNFYAWKRMEVGQQAVEVWQGLALLSEAVLRGQALLVNSSQPWEPLQLHVDKAVSGLRSLTTILRALGAQKEAISPPDAASAAPLRTITADTFRKLFRVYSNFLRGKLKLYTGEACRTGDR

SEQ ID NO: 1738 - protein, 166 aa, Homo sapiens
  EPO_L108V
APPRLICDSRVLERYLLEAKEAENITTGCAEHCSLNENITVPDTKVNFYAWKRMEVGQQAVEVWQGLALLSEAVLRGQALLVNSSQPWEPLQLHVDKAVSGLRSLTTVLRALGAQKEAISPPDAASAAPLRTITADTFRKLFRVYSNFLRGKLKLYTGEACRTGDR

SEQ ID NO: 1739 - protein, 166 aa, Homo sapiens
  EPO_L109I
APPRLICDSRVLERYLLEAKEAENITTGCAEHCSLNENITVPDTKVNFYAWKRMEVGQQAVEVWQGLALLSEAVLRGQALLVNSSQPWEPLQLHVDKAVSGLRSLTTLIRALGAQKEAISPPDAASAAPLRTITADTFRKLFRVYSNFLRGKLKLYTGEACRTGDR

SEQ ID NO: 1740 - protein, 166 aa, Homo sapiens
  EPO_L109V
APPRLICDSRVLERYLLEAKEAENITTGCAEHCSLNENITVPDTKVNFYAWKRMEVGQQAVEVWQGLALLSEAVLRGQALLVNSSQPWEPLQLHVDKAVSGLRSLTTLVRALGAQKEAISPPDAASAAPLRTITADTFRKLFRVYSNFLRGKLKLYTGEACRTGDR

SEQ ID NO: 1741 - protein, 166 aa, Homo sapiens
  EPO_R110H
APPRLICDSRVLERYLLEAKEAENITTGCAEHCSLNENITVPDTKVNFYAWKRMEVGQQAVEVWQGLALLSEAVLRGQALLVNSSQPWEPLQLHVDKAVSGLRSLTTLLHALGAQKEAISPPDAASAAPLRTITADTFRKLFRVYSNFLRGKLKLYTGEACRTGDR

SEQ ID NO: 1742 - protein, 166 aa, Homo sapiens
  EPO_R110Q
APPRLICDSRVLERYLLEAKEAENITTGCAEHCSLNENITVPDTKVNFYAWKRMEVGQQAVEVWQGLALLSEAVLRGQALLVNSSQPWEPLQLHVDKAVSGLRSLTTLLQALGAQKEAISPPDAASAAPLRTITADTFRKLFRVYSNFLRGKLKLYTGEACRTGDR

SEQ ID NO: 1743 - protein, 166 aa, Homo sapiens
  EPO_L112V
APPRLICDSRVLERYLLEAKEAENITTGCAEHCSLNENITVPDTKVNFYAWKRMEVGQQAVEVWQGLALLSEAVLRGQALLVNSSQPWEPLQLHVDKAVSGLRSLTTLLRAVGAQKEAISPPDAASAAPLRTITADTFRKLFRVYSNFLRGKLKLYTGEACRTGDR

SEQ ID NO: 1744 - protein, 166 aa, Homo sapiens
  EPO_L112I
APPRLICDSRVLERYLLEAKEAENITTGCAEHCSLNENITVPDTKVNFYAWKRMEVGQQAVEVWQGLALLSEAVLRGQALLVNSSQPWEPLQLHVDKAVSGLRSLTTLLRAIGAQKEAISPPDAASAAPLRTITADTFRKLFRVYSNFLRGKLKLYTGEACRTGDR

SEQ ID NO: 1745 - protein, 166 aa, Homo sapiens
  EPO_K116Q
APPRLICDSRVLERYLLEAKEAENITTGCAEHCSLNENITVPDTKVNFYAWKRMEVGQQAVEVWQGLALLSEAVLRGQALLVNSSQPWEPLQLHVDKAVSGLRSLTTLLRALGAQQEAISPPDAASAAPLRTITADTFRKLFRVYSNFLRGKLKLYTGEACRTGDR

SEQ ID NO: 1746 - protein, 166 aa, Homo sapiens
  EPO_K116T
APPRLICDSRVLERYLLEAKEAENITTGCAEHCSLNENITVPDTKVNFYAWKRMEVGQQAVEVWQGLALLSEAVLRGQALLVNSSQPWEPLQLHVDKAVSGLRSLTTLLRALGAQTEAISPPDAASAAPLRTITADTFRKLFRVYSNFLRGKLKLYTGEACRTGDR

SEQ ID NO: 1747 - protein, 166 aa, Homo sapiens
  EPO_K116N
APPRLICDSRVLERYLLEAKEAENITTGCAEHCSLNENITVPDTKVNFYAWKRMEVGQQAVEVWQGLALLSEAVLRGQALLVNSSQPWEPLQLHVDKAVSGLRSLTTLLRALGAQNEAISPPDAASAAPLRTITADTFRKLFRVYSNFLRGKLKLYTGEACRTGDR

SEQ ID NO: 1748 - protein, 166 aa, Homo sapiens
  EPO_E117Q
APPRLICDSRVLERYLLEAKEAENITTGCAEHCSLNENITVPDTKVNFYAWKRMEVGQQAVEVWQGLALLSEAVLRGQALLVNSSQPWEPLQLHVDKAVSGLRSLTTLLRALGAQKQAISPPDAASAAPLRTITADTFRKLFRVYSNFLRGKLKLYTGEACRTGDR

SEQ ID NO: 1749 - protein, 166 aa, Homo sapiens
  EPO_E117H
APPRLICDSRVLERYLLEAKEAENITTGCAEHCSLNENITVPDTKVNFYAWKRMEVGQQAVEVWQGLALLSEAVLRGQALLVNSSQPWEPLQLHVDKAVSGLRSLTTLLRALGAQKHAISPPDAASAAPLRTITADTFRKLFRVYSNFLRGKLKLYTGEACRTGDR

SEQ ID NO: 1750 - protein, 166 aa, Homo sapiens
  EPO_E117N
APPRLICDSRVLERYLLEAKEAENITTGCAEHCSLNENITVPDTKVNFYAWKRMEVGQQAVEVWQGLALLSEAVLRGQALLVNSSQPWEPLQLHVDKAVSGLRSLTTLLRALGAQKNAISPPDAASAAPLRTITADTFRKLFRVYSNFLRGKLKLYTGEACRTGDR

SEQ ID NO: 1751 - protein, 166 aa, Homo sapiens
  EPO_A118E
APPRLICDSRVLERYLLEAKEAENITTGCAEHCSLNENITVPDTKVNFYAWKRMEVGQQAVEVWQGLALLSEAVLRGQALLVNSSQPWEPLQLHVDKAVSGLRSLTTLLRALGAQKEEISPPDAASAAPLRTITADTFRKLFRVYSNFLRGKLKLYTGEACRTGDR

SEQ ID NO: 1752 - protein, 166 aa, Homo sapiens
  EPO_A118D
APPRLICDSRVLERYLLEAKEAENITTGCAEHCSLNENITVPDTKVNFYAWKRMEVGQQAVEVWQGLALLSEAVLRGQALLVNSSQPWEPLQLHVDKAVSGLRSLTTLLRALGAQKEDISPPDAASAAPLRTITADTFRKLFRVYSNFLRGKLKLYTGEACRTGDR

SEQ ID NO: 1753 - protein, 166 aa, Homo sapiens
  EPO_A118K
APPRLICDSRVLERYLLEAKEAENITTGCAEHCSLNENITVPDTKVNFYAWKRMEVGQQAVEVWQGLALLSEAVLRGQALLVNSSQPWEPLQLHVDKAVSGLRSLTTLLRALGAQKEKISPPDAASAAPLRTITADTFRKLFRVYSNFLRGKLKLYTGEACRTGDR

SEQ ID NO: 1754 - protein, 166 aa, Homo sapiens
  EPO_A118R
APPRLICDSRVLERYLLEAKEAENITTGCAEHCSLNENITVPDTKVNFYAWKRMEVGQQAVEVWQGLALLSEAVLRGQALLVNSSQPWEPLQLHVDKAVSGLRSLTTLLRALGAQKERISPPDAASAAPLRTITADTFRKLFRVYSNFLRGKLKLYTGEACRTGDR

SEQ ID NO: 1755 - protein, 166 aa, Homo sapiens
  EPO_I119E
APPRLICDSRVLERYLLEAKEAENITTGCAEHCSLNENITVPDTKVNFYAWKRMEVGQQAVEVWQGLALLSEAVLRGQALLVNSSQPWEPLQLHVDKAVSGLRSLTTLLRALGAQKEAESPPDAASAAPLRTITADTFRKLFRVYSNFLRGKLKLYTGEACRTGDR

SEQ ID NO: 1756 - protein, 166 aa, Homo sapiens
  EPO_I119D
APPRLICDSRVLERYLLEAKEAENITTGCAEHCSLNENITVPDTKVNFYAWKRMEVGQQAVEVWQGLALLSEAVLRGQALLVNSSQPWEPLQLHVDKAVSGLRSLTTLLRALGAQKEADSPPDAASAAPLRTITADTFRKLFRVYSNFLRGKLKLYTGEACRTGDR

SEQ ID NO: 1757 - protein, 166 aa, Homo sapiens
  EPO_I119K
APPRLICDSRVLERYLLEAKEAENITTGCAEHCSLNENITVPDTKVNFYAWKRMEVGQQAVEVWQGLALLSEAVLRGQALLVNSSQPWEPLQLHVDKAVSGLRSLTTLLRALGAQKEAKSPPDAASAAPLRTITADTFRKLFRVYSNFLRGKLKLYTGEACRTGDR

SEQ ID NO: 1758 - protein, 166 aa, Homo sapiens
  EPO_I119R
APPRLICDSRVLERYLLEAKEAENITTGCAEHCSLNENITVPDTKVNFYAWKRMEVGQQAVEVWQGLALLSEAVLRGQALLVNSSQPWEPLQLHVDKAVSGLRSLTTLLRALGAQKEARSPPDAASAAPLRTITADTFRKLFRVYSNFLRGKLKLYTGEACRTGDR

SEQ ID NO: 1759 - protein, 166 aa, Homo sapiens
  EPO_S120E
APPRLICDSRVLERYLLEAKEAENITTGCAEHCSLNENITVPDTKVNFYAWKRMEVGQQAVEVWQGLALLSEAVLRGQALLVNSSQPWEPLQLHVDKAVSGLRSLTTLLRALGAQKEAIEPPDAASAAPLRTITADTFRKLFRVYSNFLRGKLKLYTGEACRTGDR

SEQ ID NO: 1760 - protein, 166 aa, Homo sapiens
  EPO_S120D
APPRLICDSRVLERYLLEAKEAENITTGCAEHCSLNENITVPDTKVNFYAWKRMEVGQQAVEVWQGLALLSEAVLRGQALLVNSSQPWEPLQLHVDKAVSGLRSLTTLLRALGAQKEAIDPPDAASAAPLRTITADTFRKLFRVYSNFLRGKLKLYTGEACRTGDR

SEQ ID NO: 1761 - protein, 166 aa, Homo sapiens
  EPO_S120K
APPRLICDSRVLERYLLEAKEAENITTGCAEHCSLNENITVPDTKVNFYAWKRMEVGQQAVEVWQGLALLSEAVLRGQALLVNSSQPWEPLQLHVDKAVSGLRSLTTLLRALGAQKEAIKPPDAASAAPLRTITADTFRKLFRVYSNFLRGKLKLYTGEACRTGDR

SEQ ID NO: 1762 - protein, 166 aa, Homo sapiens
  EPO_S120R
APPRLICDSRVLERYLLEAKEAENITTGCAEHCSLNENITVPDTKVNFYAWKRMEVGQQAVEVWQGLALLSEAVLRGQALLVNSSQPWEPLQLHVDKAVSGLRSLTTLLRALGAQKEAIRPPDAASAAPLRTITADTFRKLFRVYSNFLRGKLKLYTGEACRTGDR

SEQ ID NO: 1763 - protein, 166 aa, Homo sapiens
  EPO_P121S
APPRLICDSRVLERYLLEAKEAENITTGCAEHCSLNENITVPDTKVNFYAWKRMEVGQQAVEVWQGLALLSEAVLRGQALLVNSSQPWEPLQLHVDKAVSGLRSLTTLLRALGAQKEAISSPDAASAAPLRTITADTFRKLFRVYSNFLRGKLKLYTGEACRTGDR

SEQ ID NO: 1764 - protein, 166 aa, Homo sapiens
  EPO_P121A
APPRLICDSRVLERYLLEAKEAENITTGCAEHCSLNENITVPDTKVNFYAWKRMEVGQQAVEVWQGLALLSEAVLRGQALLVNSSQPWEPLQLHVDKAVSGLRSLTTLLRALGAQKEAISAPDAASAAPLRTITADTFRKLFRVYSNFLRGKLKLYTGEACRTGDR

SEQ ID NO: 1765 - protein, 166 aa, Homo sapiens
  EPO_P121E
APPRLICDSRVLERYLLEAKEAENITTGCAEHCSLNENITVPDTKVNFYAWKRMEVGQQAVEVWQGLALLSEAVLRGQALLVNSSQPWEPLQLHVDKAVSGLRSLTTLLRALGAQKEAISEPDAASAAPLRTITADTFRKLFRVYSNFLRGKLKLYTGEACRTGDR

SEQ ID NO: 1766 - protein, 166 aa, Homo sapiens
  EPO_P121D
APPRLICDSRVLERYLLEAKEAENITTGCAEHCSLNENITVPDTKVNFYAWKRMEVGQQAVEVWQGLALLSEAVLRGQALLVNSSQPWEPLQLHVDKAVSGLRSLTTLLRALGAQKEAISDPDAASAAPLRTITADTFRKLFRVYSNFLRGKLKLYTGEACRTGDR

SEQ ID NO: 1767 - protein, 166 aa, Homo sapiens
  EPO_P121K
APPRLICDSRVLERYLLEAKEAENITTGCAEHCSLNENITVPDTKVNFYAWKRMEVGQQAVEVWQGLALLSEAVLRGQALLVNSSQPWEPLQLHVDKAVSGLRSLTTLLRALGAQKEAISKPDAASAAPLRTITADTFRKLFRVYSNFLRGKLKLYTGEACRTGDR

SEQ ID NO: 1768 - protein, 166 aa, Homo sapiens
  EPO_P121R
APPRLICDSRVLERYLLEAKEAENITTGCAEHCSLNENITVPDTKVNFYAWKRMEVGQQAVEVWQGLALLSEAVLRGQALLVNSSQPWEPLQLHVDKAVSGLRSLTTLLRALGAQKEAISRPDAASAAPLRTITADTFRKLFRVYSNFLRGKLKLYTGEACRTGDR

SEQ ID NO: 1769 - protein, 166 aa, Homo sapiens
  EPO_P122S
APPRLICDSRVLERYLLEAKEAENITTGCAEHCSLNENITVPDTKVNFYAWKRMEVGQQAVEVWQGLALLSEAVLRGQALLVNSSQPWEPLQLHVDKAVSGLRSLTTLLRALGAQKEAISPSDAASAAPLRTITADTFRKLFRVYSNFLRGKLKLYTGEACRTGDR

SEQ ID NO: 1770 - protein, 166 aa, Homo sapiens
  EPO_P122A
APPRLICDSRVLERYLLEAKEAENITTGCAEHCSLNENITVPDTKVNFYAWKRMEVGQQAVEVWQGLALLSEAVLRGQALLVNSSQPWEPLQLHVDKAVSGLRSLTTLLRALGAQKEAISPADAASAAPLRTITADTFRKLFRVYSNFLRGKLKLYTGEACRTGDR

SEQ ID NO: 1771 - protein, 166 aa, Homo sapiens
  EPO_P122E
APPRLICDSRVLERYLLEAKEAENITTGCAEHCSLNENITVPDTKVNFYAWKRMEVGQQAVEVWQGLALLSEAVLRGQALLVNSSQPWEPLQLHVDKAVSGLRSLTTLLRALGAQKEAISPEDAASAAPLRTITADTFRKLFRVYSNFLRGKLKLYTGEACRTGDR

SEQ ID NO: 1772 - protein, 166 aa, Homo sapiens
  EPO_P122D
APPRLICDSRVLERYLLEAKEAENITTGCAEHCSLNENITVPDTKVNFYAWKRMEVGQQAVEVWQGLALLSEAVLRGQALLVNSSQPWEPLQLHVDKAVSGLRSLTTLLRALGAQKEAISPDDAASAAPLRTITADTFRKLFRVYSNFLRGKLKLYTGEACRTGDR

SEQ ID NO: 1773 - protein, 166 aa, Homo sapiens
  EPO_P122K
APPRLICDSRVLERYLLEAKEAENITTGCAEHCSLNENITVPDTKVNFYAWKRMEVGQQAVEVWQGLALLSEAVLRGQALLVNSSQPWEPLQLHVDKAVSGLRSLTTLLRALGAQKEAISPKDAASAAPLRTITADTFRKLFRVYSNFLRGKLKLYTGEACRTGDR

SEQ ID NO: 1774 - protein, 166 aa, Homo sapiens
  EPO_P122R
APPRLICDSRVLERYLLEAKEAENITTGCAEHCSLNENITVPDTKVNFYAWKRMEVGQQAVEVWQGLALLSEAVLRGQALLVNSSQPWEPLQLHVDKAVSGLRSLTTLLRALGAQKEAISPRDAASAAPLRTITADTFRKLFRVYSNFLRGKLKLYTGEACRTGDR

SEQ ID NO: 1775 - protein, 166 aa, Homo sapiens
  EPO_D123Q
APPRLICDSRVLERYLLEAKEAENITTGCAEHCSLNENITVPDTKVNFYAWKRMEVGQQAVEVWQGLALLSEAVLRGQALLVNSSQPWEPLQLHVDKAVSGLRSLTTLLRALGAQKEAISPPQAASAAPLRTITADTFRKLFRVYSNFLRGKLKLYTGEACRTGDR

SEQ ID NO: 1776 - protein, 166 aa, Homo sapiens
  EPO_D123H
APPRLICDSRVLERYLLEAKEAENITTGCAEHCSLNENITVPDTKVNFYAWKRMEVGQQAVEVWQGLALLSEAVLRGQALLVNSSQPWEPLQLHVDKAVSGLRSLTTLLRALGAQKEAISPPHAASAAPLRTITADTFRKLFRVYSNFLRGKLKLYTGEACRTGDR

SEQ ID NO: 1777 - protein, 166 aa, Homo sapiens
  EPO_D123N
APPRLICDSRVLERYLLEAKEAENITTGCAEHCSLNENITVPDTKVNFYAWKRMEVGQQAVEVWQGLALLSEAVLRGQALLVNSSQPWEPLQLHVDKAVSGLRSLTTLLRALGAQKEAISPPNAASAAPLRTITADTFRKLFRVYSNFLRGKLKLYTGEACRTGDR

SEQ ID NO: 1778 - protein, 166 aa, Homo sapiens
  EPO_D123E
APPRLICDSRVLERYLLEAKEAENITTGCAEHCSLNENITVPDTKVNFYAWKRMEVGQQAVEVWQGLALLSEAVLRGQALLVNSSQPWEPLQLHVDKAVSGLRSLTTLLRALGAQKEAISPPEAASAAPLRTITADTFRKLFRVYSNFLRGKLKLYTGEACRTGDR

SEQ ID NO: 1779 - protein, 166 aa, Homo sapiens
  EPO_D123K
APPRLICDSRVLERYLLEAKEAENITTGCAEHCSLNENITVPDTKVNFYAWKRMEVGQQAVEVWQGLALLSEAVLRGQALLVNSSQPWEPLQLHVDKAVSGLRSLTTLLRALGAQKEAISPPKAASAAPLRTITADTFRKLFRVYSNFLRGKLKLYTGEACRTGDR

SEQ ID NO: 1780 - protein, 166 aa, Homo sapiens
  EPO_D123R
APPRLICDSRVLERYLLEAKEAENITTGCAEHCSLNENITVPDTKVNFYAWKRMEVGQQAVEVWQGLALLSEAVLRGQALLVNSSQPWEPLQLHVDKAVSGLRSLTTLLRALGAQKEAISPPRAASAAPLRTITADTFRKLFRVYSNFLRGKLKLYTGEACRTGDR

SEQ ID NO: 1781 - protein, 166 aa, Homo sapiens
  EPO_A124E
APPRLICDSRVLERYLLEAKEAENITTGCAEHCSLNENITVPDTKVNFYAWKRMEVGQQAVEVWQGLALLSEAVLRGQALLVNSSQPWEPLQLHVDKAVSGLRSLTTLLRALGAQKEAISPPDEASAAPLRTITADTFRKLFRVYSNFLRGKLKLYTGEACRTGDR

SEQ ID NO: 1782 - protein, 166 aa, Homo sapiens
  EPO_A124D
APPRLICDSRVLERYLLEAKEAENITTGCAEHCSLNENITVPDTKVNFYAWKRMEVGQQAVEVWQGLALLSEAVLRGQALLVNSSQPWEPLQLHVDKAVSGLRSLTTLLRALGAQKEAISPPDDASAAPLRTITADTFRKLFRVYSNFLRGKLKLYTGEACRTGDR

SEQ ID NO: 1783 - protein, 166 aa, Homo sapiens
  EPO_A124K
APPRLICDSRVLERYLLEAKEAENITTGCAEHCSLNENITVPDTKVNFYAWKRMEVGQQAVEVWQGLALLSEAVLRGQALLVNSSQPWEPLQLHVDKAVSGLRSLTTLLRALGAQKEAISPPDKASAAPLRTITADTFRKLFRVYSNFLRGKLKLYTGEACRTGDR

SEQ ID NO: 1784 - protein, 166 aa, Homo sapiens
  EPO_A124R
APPRLICDSRVLERYLLEAKEAENITTGCAEHCSLNENITVPDTKVNFYAWKRMEVGQQAVEVWQGLALLSEAVLRGQALLVNSSQPWEPLQLHVDKAVSGLRSLTTLLRALGAQKEAISPPDRASAAPLRTITADTFRKLFRVYSNFLRGKLKLYTGEACRTGDR

SEQ ID NO: 1785 - protein, 166 aa, Homo sapiens
  EPO_A125E
APPRLICDSRVLERYLLEAKEAENITTGCAEHCSLNENITVPDTKVNFYAWKRMEVGQQAVEVWQGLALLSEAVLRGQALLVNSSQPWEPLQLHVDKAVSGLRSLTTLLRALGAQKEAISPPDAESAAPLRTITADTFRKLFRVYSNFLRGKLKLYTGEACRTGDR

SEQ ID NO: 1786 - protein, 166 aa, Homo sapiens
  EPO_A125D
APPRLICDSRVLERYLLEAKEAENITTGCAEHCSLNENITVPDTKVNFYAWKRMEVGQQAVEVWQGLALLSEAVLRGQALLVNSSQPWEPLQLHVDKAVSGLRSLTTLLRALGAQKEAISPPDADSAAPLRTITADTFRKLFRVYSNFLRGKLKLYTGEACRTGDR

SEQ ID NO: 1787 - protein, 166 aa, Homo sapiens
  EPO_A125K
APPRLICDSRVLERYLLEAKEAENITTGCAEHCSLNENITVPDTKVNFYAWKRMEVGQQAVEVWQGLALLSEAVLRGQALLVNSSQPWEPLQLHVDKAVSGLRSLTTLLRALGAQKEAISPPDAKSAAPLRTITADTFRKLFRVYSNFLRGKLKLYTGEACRTGDR

SEQ ID NO: 1788 - protein, 166 aa, Homo sapiens
  EPO_A125R
APPRLICDSRVLERYLLEAKEAENITTGCAEHCSLNENITVPDTKVNFYAWKRMEVGQQAVEVWQGLALLSEAVLRGQALLVNSSQPWEPLQLHVDKAVSGLRSLTTLLRALGAQKEAISPPDARSAAPLRTITADTFRKLFRVYSNFLRGKLKLYTGEACRTGDR

SEQ ID NO: 1789 - protein, 166 aa, Homo sapiens
  EPO_S126E
APPRLICDSRVLERYLLEAKEAENITTGCAEHCSLNENITVPDTKVNFYAWKRMEVGQQAVEVWQGLALLSEAVLRGQALLVNSSQPWEPLQLHVDKAVSGLRSLTTLLRALGAQKEAISPPDAAEAAPLRTITADTFRKLFRVYSNFLRGKLKLYTGEACRTGDR

SEQ ID NO: 1790 - protein, 166 aa, Homo sapiens
  EPO_S126D
APPRLICDSRVLERYLLEAKEAENITTGCAEHCSLNENITVPDTKVNFYAWKRMEVGQQAVEVWQGLALLSEAVLRGQALLVNSSQPWEPLQLHVDKAVSGLRSLTTLLRALGAQKEAISPPDAADAAPLRTITADTFRKLFRVYSNFLRGKLKLYTGEACRTGDR

SEQ ID NO: 1791 - protein, 166 aa, Homo sapiens
  EPO_S126K
APPRLICDSRVLERYLLEAKEAENITTGCAEHCSLNENITVPDTKVNFYAWKRMEVGQQAVEVWQGLALLSEAVLRGQALLVNSSQPWEPLQLHVDKAVSGLRSLTTLLRALGAQKEAISPPDAAKAAPLRTITADTFRKLFRVYSNFLRGKLKLYTGEACRTGDR

SEQ ID NO: 1792 - protein, 166 aa, Homo sapiens
  EPO_S126R
APPRLICDSRVLERYLLEAKEAENITTGCAEHCSLNENITVPDTKVNFYAWKRMEVGQQAVEVWQGLALLSEAVLRGQALLVNSSQPWEPLQLHVDKAVSGLRSLTTLLRALGAQKEAISPPDAARAAPLRTITADTFRKLFRVYSNFLRGKLKLYTGEACRTGDR

SEQ ID NO: 1793 - protein, 166 aa, Homo sapiens
  EPO_A127E
APPRLICDSRVLERYLLEAKEAENITTGCAEHCSLNENITVPDTKVNFYAWKRMEVGQQAVEVWQGLALLSEAVLRGQALLVNSSQPWEPLQLHVDKAVSGLRSLTTLLRALGAQKEAISPPDAASEAPLRTITADTFRKLFRVYSNFLRGKLKLYTGEACRTGDR

SEQ ID NO: 1794 - protein, 166 aa, Homo sapiens
  EPO_A127D
APPRLICDSRVLERYLLEAKEAENITTGCAEHCSLNENITVPDTKVNFYAWKRMEVGQQAVEVWQGLALLSEAVLRGQALLVNSSQPWEPLQLHVDKAVSGLRSLTTLLRALGAQKEAISPPDAASDAPLRTITADTFRKLFRVYSNFLRGKLKLYTGEACRTGDR

SEQ ID NO: 1795 - protein, 166 aa, Homo sapiens
  EPO_A127K
APPRLICDSRVLERYLLEAKEAENITTGCAEHCSLNENITVPDTKVNFYAWKRMEVGQQAVEVWQGLALLSEAVLRGQALLVNSSQPWEPLQLHVDKAVSGLRSLTTLLRALGAQKEAISPPDAASKAPLRTITADTFRKLFRVYSNFLRGKLKLYTGEACRTGDR

SEQ ID NO: 1796 - protein, 166 aa, Homo sapiens
  EPO_A127R
APPRLICDSRVLERYLLEAKEAENITTGCAEHCSLNENITVPDTKVNFYAWKRMEVGQQAVEVWQGLALLSEAVLRGQALLVNSSQPWEPLQLHVDKAVSGLRSLTTLLRALGAQKEAISPPDAASRAPLRTITADTFRKLFRVYSNFLRGKLKLYTGEACRTGDR

SEQ ID NO: 1797 - protein, 166 aa, Homo sapiens
  EPO_A128E
APPRLICDSRVLERYLLEAKEAENITTGCAEHCSLNENITVPDTKVNFYAWKRMEVGQQAVEVWQGLALLSEAVLRGQALLVNSSQPWEPLQLHVDKAVSGLRSLTTLLRALGAQKEAISPPDAASAEPLRTITADTFRKLFRVYSNFLRGKLKLYTGEACRTGDR

SEQ ID NO: 1798 - protein, 166 aa, Homo sapiens
  EPO_A128D
APPRLICDSRVLERYLLEAKEAENITTGCAEHCSLNENITVPDTKVNFYAWKRMEVGQQAVEVWQGLALLSEAVLRGQALLVNSSQPWEPLQLHVDKAVSGLRSLTTLLRALGAQKEAISPPDAASADPLRTITADTFRKLFRVYSNFLRGKLKLYTGEACRTGDR

SEQ ID NO: 1799 - protein, 166 aa, Homo sapiens
  EPO_A128K
APPRLICDSRVLERYLLEAKEAENITTGCAEHCSLNENITVPDTKVNFYAWKRMEVGQQAVEVWQGLALLSEAVLRGQALLVNSSQPWEPLQLHVDKAVSGLRSLTTLLRALGAQKEAISPPDAASAKPLRTITADTFRKLFRVYSNFLRGKLKLYTGEACRTGDR

SEQ ID NO: 1800 - protein, 166 aa, Homo sapiens
  EPO_A128R
APPRLICDSRVLERYLLEAKEAENITTGCAEHCSLNENITVPDTKVNFYAWKRMEVGQQAVEVWQGLALLSEAVLRGQALLVNSSQPWEPLQLHVDKAVSGLRSLTTLLRALGAQKEAISPPDAASARPLRTITADTFRKLFRVYSNFLRGKLKLYTGEACRTGDR

SEQ ID NO: 1801 - protein, 166 aa, Homo sapiens
  EPO_P129S
APPRLICDSRVLERYLLEAKEAENITTGCAEHCSLNENITVPDTKVNFYAWKRMEVGQQAVEVWQGLALLSEAVLRGQALLVNSSQPWEPLQLHVDKAVSGLRSLTTLLRALGAQKEAISPPDAASAASLRTITADTFRKLFRVYSNFLRGKLKLYTGEACRTGDR

SEQ ID NO: 1802 - protein, 166 aa, Homo sapiens
  EPO_P129A
APPRLICDSRVLERYLLEAKEAENITTGCAEHCSLNENITVPDTKVNFYAWKRMEVGQQAVEVWQGLALLSEAVLRGQALLVNSSQPWEPLQLHVDKAVSGLRSLTTLLRALGAQKEAISPPDAASAAALRTITADTFRKLFRVYSNFLRGKLKLYTGEACRTGDR

SEQ ID NO: 1803 - protein, 166 aa, Homo sapiens
  EPO_P129K
APPRLICDSRVLERYLLEAKEAENITTGCAEHCSLNENITVPDTKVNFYAWKRMEVGQQAVEVWQGLALLSEAVLRGQALLVNSSQPWEPLQLHVDKAVSGLRSLTTLLRALGAQKEAISPPDAASAAKLRTITADTFRKLFRVYSNFLRGKLKLYTGEACRTGDR

SEQ ID NO: 1804 - protein, 166 aa, Homo sapiens
  EPO_P129R
APPRLICDSRVLERYLLEAKEAENITTGCAEHCSLNENITVPDTKVNFYAWKRMEVGQQAVEVWQGLALLSEAVLRGQALLVNSSQPWEPLQLHVDKAVSGLRSLTTLLRALGAQKEAISPPDAASAARLRTITADTFRKLFRVYSNFLRGKLKLYTGEACRTGDR

SEQ ID NO: 1805 - protein, 166 aa, Homo sapiens
  EPO_P129E
APPRLICDSRVLERYLLEAKEAENITTGCAEHCSLNENITVPDTKVNFYAWKRMEVGQQAVEVWQGLALLSEAVLRGQALLVNSSQPWEPLQLHVDKAVSGLRSLTTLLRALGAQKEAISPPDAASAAELRTITADTFRKLFRVYSNFLRGKLKLYTGEACRTGDR

SEQ ID NO: 1806 - protein, 166 aa, Homo sapiens
  EPO_P129D
APPRLICDSRVLERYLLEAKEAENITTGCAEHCSLNENITVPDTKVNFYAWKRMEVGQQAVEVWQGLALLSEAVLRGQALLVNSSQPWEPLQLHVDKAVSGLRSLTTLLRALGAQKEAISPPDAASAADLRTITADTFRKLFRVYSNFLRGKLKLYTGEACRTGDR

SEQ ID NO: 1807 - protein, 166 aa, Homo sapiens
  EPO_L130V
APPRLICDSRVLERYLLEAKEAENITTGCAEHCSLNENITVPDTKVNFYAWKRMEVGQQAVEVWQGLALLSEAVLRGQALLVNSSQPWEPLQLHVDKAVSGLRSLTTLLRALGAQKEAISPPDAASAAPVRTITADTFRKLFRVYSNFLRGKLKLYTGEACRTGDR

SEQ ID NO: 1808 - protein, 166 aa, Homo sapiens
  EPO_L130I
APPRLICDSRVLERYLLEAKEAENITTGCAEHCSLNENITVPDTKVNFYAWKRMEVGQQAVEVWQGLALLSEAVLRGQALLVNSSQPWEPLQLHVDKAVSGLRSLTTLLRALGAQKEAISPPDAASAAPIRTITADTFRKLFRVYSNFLRGKLKLYTGEACRTGDR

SEQ ID NO: 1809 - protein, 166 aa, Homo sapiens
  EPO_L130K
APPRLICDSRVLERYLLEAKEAENITTGCAEHCSLNENITVPDTKVNFYAWKRMEVGQQAVEVWQGLALLSEAVLRGQALLVNSSQPWEPLQLHVDKAVSGLRSLTTLLRALGAQKEAISPPDAASAAPKRTITADTFRKLFRVYSNFLRGKLKLYTGEACRTGDR

SEQ ID NO: 1810 - protein, 166 aa, Homo sapiens
  EPO_L130R
APPRLICDSRVLERYLLEAKEAENITTGCAEHCSLNENITVPDTKVNFYAWKRMEVGQQAVEVWQGLALLSEAVLRGQALLVNSSQPWEPLQLHVDKAVSGLRSLTTLLRALGAQKEAISPPDAASAAPRRTITADTFRKLFRVYSNFLRGKLKLYTGEACRTGDR

SEQ ID NO: 1811 - protein, 166 aa, Homo sapiens
  EPO_L130E
APPRLICDSRVLERYLLEAKEAENITTGCAEHCSLNENITVPDTKVNFYAWKRMEVGQQAVEVWQGLALLSEAVLRGQALLVNSSQPWEPLQLHVDKAVSGLRSLTTLLRALGAQKEAISPPDAASAAPERTITADTFRKLFRVYSNFLRGKLKLYTGEACRTGDR

SEQ ID NO: 1812 - protein, 166 aa, Homo sapiens
  EPO_L130D
APPRLICDSRVLERYLLEAKEAENITTGCAEHCSLNENITVPDTKVNFYAWKRMEVGQQAVEVWQGLALLSEAVLRGQALLVNSSQPWEPLQLHVDKAVSGLRSLTTLLRALGAQKEAISPPDAASAAPDRTITADTFRKLFRVYSNFLRGKLKLYTGEACRTGDR

SEQ ID NO: 1813 - protein, 166 aa, Homo sapiens
  EPO_R131H
APPRLICDSRVLERYLLEAKEAENITTGCAEHCSLNENITVPDTKVNFYAWKRMEVGQQAVEVWQGLALLSEAVLRGQALLVNSSQPWEPLQLHVDKAVSGLRSLTTLLRALGAQKEAISPPDAASAAPLHTITADTFRKLFRVYSNFLRGKLKLYTGEACRTGDR

SEQ ID NO: 1814 - protein, 166 aa, Homo sapiens
  EPO_R131Q
APPRLICDSRVLERYLLEAKEAENITTGCAEHCSLNENITVPDTKVNFYAWKRMEVGQQAVEVWQGLALLSEAVLRGQALLVNSSQPWEPLQLHVDKAVSGLRSLTTLLRALGAQKEAISPPDAASAAPLQTITADTFRKLFRVYSNFLRGKLKLYTGEACRTGDR

SEQ ID NO: 1815 - protein, 166 aa, Homo sapiens
  EPO_T132K
APPRLICDSRVLERYLLEAKEAENITTGCAEHCSLNENITVPDTKVNFYAWKRMEVGQQAVEVWQGLALLSEAVLRGQALLVNSSQPWEPLQLHVDKAVSGLRSLTTLLRALGAQKEAISPPDAASAAPLRKITADTFRKLFRVYSNFLRGKLKLYTGEACRTGDR

SEQ ID NO: 1816 - protein, 166 aa, Homo sapiens
  EPO_T132R
APPRLICDSRVLERYLLEAKEAENITTGCAEHCSLNENITVPDTKVNFYAWKRMEVGQQAVEVWQGLALLSEAVLRGQALLVNSSQPWEPLQLHVDKAVSGLRSLTTLLRALGAQKEAISPPDAASAAPLRRITADTFRKLFRVYSNFLRGKLKLYTGEACRTGDR

SEQ ID NO: 1817 - protein, 166 aa, Homo sapiens
  EPO_I133K
APPRLICDSRVLERYLLEAKEAENITTGCAEHCSLNENITVPDTKVNFYAWKRMEVGQQAVEVWQGLALLSEAVLRGQALLVNSSQPWEPLQLHVDKAVSGLRSLTTLLRALGAQKEAISPPDAASAAPLRTKTADTFRKLFRVYSNFLRGKLKLYTGEACRTGDR

SEQ ID NO: 1818 - protein, 166 aa, Homo sapiens
  EPO_I133R
APPRLICDSRVLERYLLEAKEAENITTGCAEHCSLNENITVPDTKVNFYAWKRMEVGQQAVEVWQGLALLSEAVLRGQALLVNSSQPWEPLQLHVDKAVSGLRSLTTLLRALGAQKEAISPPDAASAAPLRTRTADTFRKLFRVYSNFLRGKLKLYTGEACRTGDR

SEQ ID NO: 1819 - protein, 166 aa, Homo sapiens
  EPO_I133E
APPRLICDSRVLERYLLEAKEAENITTGCAEHCSLNENITVPDTKVNFYAWKRMEVGQQAVEVWQGLALLSEAVLRGQALLVNSSQPWEPLQLHVDKAVSGLRSLTTLLRALGAQKEAISPPDAASAAPLRTETADTFRKLFRVYSNFLRGKLKLYTGEACRTGDR

SEQ ID NO: 1820 - protein, 166 aa, Homo sapiens
  EPO_I133D
APPRLICDSRVLERYLLEAKEAENITTGCAEHCSLNENITVPDTKVNFYAWKRMEVGQQAVEVWQGLALLSEAVLRGQALLVNSSQPWEPLQLHVDKAVSGLRSLTTLLRALGAQKEAISPPDAASAAPLRTDTADTFRKLFRVYSNFLRGKLKLYTGEACRTGDR

SEQ ID NO: 1821 - protein, 166 aa, Homo sapiens
  EPO_T134K
APPRLICDSRVLERYLLEAKEAENITTGCAEHCSLNENITVPDTKVNFYAWKRMEVGQQAVEVWQGLALLSEAVLRGQALLVNSSQPWEPLQLHVDKAVSGLRSLTTLLRALGAQKEAISPPDAASAAPLRTIKADTFRKLFRVYSNFLRGKLKLYTGEACRTGDR

SEQ ID NO: 1822 - protein, 166 aa, Homo sapiens
  EPO_T134R
APPRLICDSRVLERYLLEAKEAENITTGCAEHCSLNENITVPDTKVNFYAWKRMEVGQQAVEVWQGLALLSEAVLRGQALLVNSSQPWEPLQLHVDKAVSGLRSLTTLLRALGAQKEAISPPDAASAAPLRTIRADTFRKLFRVYSNFLRGKLKLYTGEACRTGDR

SEQ ID NO: 1823 - protein, 166 aa, Homo sapiens
  EPO_T134E
APPRLICDSRVLERYLLEAKEAENITTGCAEHCSLNENITVPDTKVNFYAWKRMEVGQQAVEVWQGLALLSEAVLRGQALLVNSSQPWEPLQLHVDKAVSGLRSLTTLLRALGAQKEAISPPDAASAAPLRTIEADTFRKLFRVYSNFLRGKLKLYTGEACRTGDR

SEQ ID NO: 1824 - protein, 166 aa, Homo sapiens
  EPO_T134D
APPRLICDSRVLERYLLEAKEAENITTGCAEHCSLNENITVPDTKVNFYAWKRMEVGQQAVEVWQGLALLSEAVLRGQALLVNSSQPWEPLQLHVDKAVSGLRSLTTLLRALGAQKEAISPPDAASAAPLRTIDADTFRKLFRVYSNFLRGKLKLYTGEACRTGDR

SEQ ID NO: 1825 - protein, 166 aa, Homo sapiens
  EPO_D136Q
APPRLICDSRVLERYLLEAKEAENITTGCAEHCSLNENITVPDTKVNFYAWKRMEVGQQAVEVWQGLALLSEAVLRGQALLVNSSQPWEPLQLHVDKAVSGLRSLTTLLRALGAQKEAISPPDAASAAPLRTITAQTFRKLFRVYSNFLRGKLKLYTGEACRTGDR

SEQ ID NO: 1826 - protein, 166 aa, Homo sapiens
  EPO_D136H
APPRLICDSRVLERYLLEAKEAENITTGCAEHCSLNENITVPDTKVNFYAWKRMEVGQQAVEVWQGLALLSEAVLRGQALLVNSSQPWEPLQLHVDKAVSGLRSLTTLLRALGAQKEAISPPDAASAAPLRTITAHTFRKLFRVYSNFLRGKLKLYTGEACRTGDR

SEQ ID NO: 1827 - protein, 166 aa, Homo sapiens
  EPO_D136K
APPRLICDSRVLERYLLEAKEAENITTGCAEHCSLNENITVPDTKVNFYAWKRMEVGQQAVEVWQGLALLSEAVLRGQALLVNSSQPWEPLQLHVDKAVSGLRSLTTLLRALGAQKEAISPPDAASAAPLRTITAKTFRKLFRVYSNFLRGKLKLYTGEACRTGDR

SEQ ID NO: 1828 - protein, 166 aa, Homo sapiens
  EPO_D136R
APPRLICDSRVLERYLLEAKEAENITTGCAEHCSLNENITVPDTKVNFYAWKRMEVGQQAVEVWQGLALLSEAVLRGQALLVNSSQPWEPLQLHVDKAVSGLRSLTTLLRALGAQKEAISPPDAASAAPLRTITARTFRKLFRVYSNFLRGKLKLYTGEACRTGDR

SEQ ID NO: 1829 - protein, 166 aa, Homo sapiens
  EPO_T137K
APPRLICDSRVLERYLLEAKEAENITTGCAEHCSLNENITVPDTKVNFYAWKRMEVGQQAVEVWQGLALLSEAVLRGQALLVNSSQPWEPLQLHVDKAVSGLRSLTTLLRALGAQKEAISPPDAASAAPLRTITADKFRKLFRVYSNFLRGKLKLYTGEACRTGDR

SEQ ID NO: 1830 - protein, 166 aa, Homo sapiens
  EPO_T137R
APPRLICDSRVLERYLLEAKEAENITTGCAEHCSLNENITVPDTKVNFYAWKRMEVGQQAVEVWQGLALLSEAVLRGQALLVNSSQPWEPLQLHVDKAVSGLRSLTTLLRALGAQKEAISPPDAASAAPLRTITADRFRKLFRVYSNFLRGKLKLYTGEACRTGDR

SEQ ID NO: 1831 - protein, 166 aa, Homo sapiens
  EPO_T137E
APPRLICDSRVLERYLLEAKEAENITTGCAEHCSLNENITVPDTKVNFYAWKRMEVGQQAVEVWQGLALLSEAVLRGQALLVNSSQPWEPLQLHVDKAVSGLRSLTTLLRALGAQKEAISPPDAASAAPLRTITADEFRKLFRVYSNFLRGKLKLYTGEACRTGDR

SEQ ID NO: 1832 - protein, 166 aa, Homo sapiens
  EPO_T137D
APPRLICDSRVLERYLLEAKEAENITTGCAEHCSLNENITVPDTKVNFYAWKRMEVGQQAVEVWQGLALLSEAVLRGQALLVNSSQPWEPLQLHVDKAVSGLRSLTTLLRALGAQKEAISPPDAASAAPLRTITADDFRKLFRVYSNFLRGKLKLYTGEACRTGDR

SEQ ID NO: 1833 - protein, 166 aa, Homo sapiens
  EPO_F138I
APPRLICDSRVLERYLLEAKEAENITTGCAEHCSLNENITVPDTKVNFYAWKRMEVGQQAVEVWQGLALLSEAVLRGQALLVNSSQPWEPLQLHVDKAVSGLRSLTTLLRALGAQKEAISPPDAASAAPLRTITADTIRKLFRVYSNFLRGKLKLYTGEACRTGDR

SEQ ID NO: 1834 - protein, 166 aa, Homo sapiens
  EPO_F138V
APPRLICDSRVLERYLLEAKEAENITTGCAEHCSLNENITVPDTKVNFYAWKRMEVGQQAVEVWQGLALLSEAVLRGQALLVNSSQPWEPLQLHVDKAVSGLRSLTTLLRALGAQKEAISPPDAASAAPLRTITADTVRKLFRVYSNFLRGKLKLYTGEACRTGDR

SEQ ID NO: 1835 - protein, 166 aa, Homo sapiens
  EPO_R139H
APPRLICDSRVLERYLLEAKEAENITTGCAEHCSLNENITVPDTKVNFYAWKRMEVGQQAVEVWQGLALLSEAVLRGQALLVNSSQPWEPLQLHVDKAVSGLRSLTTLLRALGAQKEAISPPDAASAAPLRTITADTFHKLFRVYSNFLRGKLKLYTGEACRTGDR

SEQ ID NO: 1836 - protein, 166 aa, Homo sapiens
  EPO_R139Q
APPRLICDSRVLERYLLEAKEAENITTGCAEHCSLNENITVPDTKVNFYAWKRMEVGQQAVEVWQGLALLSEAVLRGQALLVNSSQPWEPLQLHVDKAVSGLRSLTTLLRALGAQKEAISPPDAASAAPLRTITADTFQKLFRVYSNFLRGKLKLYTGEACRTGDR

SEQ ID NO: 1837 - protein, 166 aa, Homo sapiens
  EPO_K140N
APPRLICDSRVLERYLLEAKEAENITTGCAEHCSLNENITVPDTKVNFYAWKRMEVGQQAVEVWQGLALLSEAVLRGQALLVNSSQPWEPLQLHVDKAVSGLRSLTTLLRALGAQKEAISPPDAASAAPLRTITADTFRNLFRVYSNFLRGKLKLYTGEACRTGDR

SEQ ID NO: 1838 - protein, 166 aa, Homo sapiens
  EPO_K140Q
APPRLICDSRVLERYLLEAKEAENITTGCAEHCSLNENITVPDTKVNFYAWKRMEVGQQAVEVWQGLALLSEAVLRGQALLVNSSQPWEPLQLHVDKAVSGLRSLTTLLRALGAQKEAISPPDAASAAPLRTITADTFRQLFRVYSNFLRGKLKLYTGEACRTGDR

SEQ ID NO: 1839 - protein, 166 aa, Homo sapiens
  EPO_L141I
APPRLICDSRVLERYLLEAKEAENITTGCAEHCSLNENITVPDTKVNFYAWKRMEVGQQAVEVWQGLALLSEAVLRGQALLVNSSQPWEPLQLHVDKAVSGLRSLTTLLRALGAQKEAISPPDAASAAPLRTITADTFRKIFRVYSNFLRGKLKLYTGEACRTGDR

SEQ ID NO: 1840 - protein, 166 aa, Homo sapiens
  EPO_L141V
APPRLICDSRVLERYLLEAKEAENITTGCAEHCSLNENITVPDTKVNFYAWKRMEVGQQAVEVWQGLALLSEAVLRGQALLVNSSQPWEPLQLHVDKAVSGLRSLTTLLRALGAQKEAISPPDAASAAPLRTITADTFRKVFRVYSNFLRGKLKLYTGEACRTGDR

SEQ ID NO: 1841 - protein, 166 aa, Homo sapiens
  EPO_L141K
APPRLICDSRVLERYLLEAKEAENITTGCAEHCSLNENITVPDTKVNFYAWKRMEVGQQAVEVWQGLALLSEAVLRGQALLVNSSQPWEPLQLHVDKAVSGLRSLTTLLRALGAQKEAISPPDAASAAPLRTITADTFRKKFRVYSNFLRGKLKLYTGEACRTGDR

SEQ ID NO: 1842 - protein, 166 aa, Homo sapiens
  EPO_L141R
APPRLICDSRVLERYLLEAKEAENITTGCAEHCSLNENITVPDTKVNFYAWKRMEVGQQAVEVWQGLALLSEAVLRGQALLVNSSQPWEPLQLHVDKAVSGLRSLTTLLRALGAQKEAISPPDAASAAPLRTITADTFRKRFRVYSNFLRGKLKLYTGEACRTGDR

SEQ ID NO: 1843 - protein, 166 aa, Homo sapiens
  EPO_F142I
APPRLICDSRVLERYLLEAKEAENITTGCAEHCSLNENITVPDTKVNFYAWKRMEVGQQAVEVWQGLALLSEAVLRGQALLVNSSQPWEPLQLHVDKAVSGLRSLTTLLRALGAQKEAISPPDAASAAPLRTITADTFRKLIRVYSNFLRGKLKLYTGEACRTGDR

SEQ ID NO: 1844 - protein, 166 aa, Homo sapiens
  EPO_F142V
APPRLICDSRVLERYLLEAKEAENITTGCAEHCSLNENITVPDTKVNFYAWKRMEVGQQAVEVWQGLALLSEAVLRGQALLVNSSQPWEPLQLHVDKAVSGLRSLTTLLRALGAQKEAISPPDAASAAPLRTITADTFRKLVRVYSNFLRGKLKLYTGEACRTGDR

SEQ ID NO: 1845 - protein, 166 aa, Homo sapiens
  EPO_F142K
APPRLICDSRVLERYLLEAKEAENITTGCAEHCSLNENITVPDTKVNFYAWKRMEVGQQAVEVWQGLALLSEAVLRGQALLVNSSQPWEPLQLHVDKAVSGLRSLTTLLRALGAQKEAISPPDAASAAPLRTITADTFRKLKRVYSNFLRGKLKLYTGEACRTGDR

SEQ ID NO: 1846 - protein, 166 aa, Homo sapiens
  EPO_F142R
APPRLICDSRVLERYLLEAKEAENITTGCAEHCSLNENITVPDTKVNFYAWKRMEVGQQAVEVWQGLALLSEAVLRGQALLVNSSQPWEPLQLHVDKAVSGLRSLTTLLRALGAQKEAISPPDAASAAPLRTITADTFRKLRRVYSNFLRGKLKLYTGEACRTGDR

SEQ ID NO: 1847 - protein, 166 aa, Homo sapiens
  EPO_R143H
APPRLICDSRVLERYLLEAKEAENITTGCAEHCSLNENITVPDTKVNFYAWKRMEVGQQAVEVWQGLALLSEAVLRGQALLVNSSQPWEPLQLHVDKAVSGLRSLTTLLRALGAQKEAISPPDAASAAPLRTITADTFRKLFHVYSNFLRGKLKLYTGEACRTGDR

SEQ ID NO: 1848 - protein, 166 aa, Homo sapiens
  EPO_D136N
APPRLICDSRVLERYLLEAKEAENITTGCAEHCSLNENITVPDTKVNFYAWKRMEVGQQAVEVWQGLALLSEAVLRGQALLVNSSQPWEPLQLHVDKAVSGLRSLTTLLRALGAQKEAISPPDAASAAPLRTITANTFRKLFRVYSNFLRGKLKLYTGEACRTGDR

SEQ ID NO: 1849 - protein, 166 aa, Homo sapiens
  EPO_R143Q
APPRLICDSRVLERYLLEAKEAENITTGCAEHCSLNENITVPDTKVNFYAWKRMEVGQQAVEVWQGLALLSEAVLRGQALLVNSSQPWEPLQLHVDKAVSGLRSLTTLLRALGAQKEAISPPDAASAAPLRTITADTFRKLFQVYSNFLRGKLKLYTGEACRTGDR

SEQ ID NO: 1850 - protein, 166 aa, Homo sapiens
  EPO_V144K
APPRLICDSRVLERYLLEAKEAENITTGCAEHCSLNENITVPDTKVNFYAWKRMEVGQQAVEVWQGLALLSEAVLRGQALLVNSSQPWEPLQLHVDKAVSGLRSLTTLLRALGAQKEAISPPDAASAAPLRTITADTFRKLFRKYSNFLRGKLKLYTGEACRTGDR

SEQ ID NO: 1851 - protein, 166 aa, Homo sapiens
  EPO_V144R
APPRLICDSRVLERYLLEAKEAENITTGCAEHCSLNENITVPDTKVNFYAWKRMEVGQQAVEVWQGLALLSEAVLRGQALLVNSSQPWEPLQLHVDKAVSGLRSLTTLLRALGAQKEAISPPDAASAAPLRTITADTFRKLFRRYSNFLRGKLKLYTGEACRTGDR

SEQ ID NO: 1852 - protein, 166 aa, Homo sapiens
  EPO_Y145H
APPRLICDSRVLERYLLEAKEAENITTGCAEHCSLNENITVPDTKVNFYAWKRMEVGQQAVEVWQGLALLSEAVLRGQALLVNSSQPWEPLQLHVDKAVSGLRSLTTLLRALGAQKEAISPPDAASAAPLRTITADTFRKLFRVHSNFLRGKLKLYTGEACRTGDR

SEQ ID NO: 1853 - protein, 166 aa, Homo sapiens
  EPO_Y145I
APPRLICDSRVLERYLLEAKEAENITTGCAEHCSLNENITVPDTKVNFYAWKRMEVGQQAVEVWQGLALLSEAVLRGQALLVNSSQPWEPLQLHVDKAVSGLRSLTTLLRALGAQKEAISPPDAASAAPLRTITADTFRKLFRVISNFLRGKLKLYTGEACRTGDR

SEQ ID NO: 1854 - protein, 166 aa, Homo sapiens
  EPO_Y145K
APPRLICDSRVLERYLLEAKEAENITTGCAEHCSLNENITVPDTKVNFYAWKRMEVGQQAVEVWQGLALLSEAVLRGQALLVNSSQPWEPLQLHVDKAVSGLRSLTTLLRALGAQKEAISPPDAASAAPLRTITADTFRKLFRVKSNFLRGKLKLYTGEACRTGDR

SEQ ID NO: 1855 - protein, 166 aa, Homo sapiens
  EPO_Y145R
APPRLICDSRVLERYLLEAKEAENITTGCAEHCSLNENITVPDTKVNFYAWKRMEVGQQAVEVWQGLALLSEAVLRGQALLVNSSQPWEPLQLHVDKAVSGLRSLTTLLRALGAQKEAISPPDAASAAPLRTITADTFRKLFRVRSNFLRGKLKLYTGEACRTGDR

SEQ ID NO: 1856 - protein, 166 aa, Homo sapiens
  EPO_S146K
APPRLICDSRVLERYLLEAKEAENITTGCAEHCSLNENITVPDTKVNFYAWKRMEVGQQAVEVWQGLALLSEAVLRGQALLVNSSQPWEPLQLHVDKAVSGLRSLTTLLRALGAQKEAISPPDAASAAPLRTITADTFRKLFRVYKNFLRGKLKLYTGEACRTGDR

SEQ ID NO: 1857 - protein, 166 aa, Homo sapiens
  EPO_S146R
APPRLICDSRVLERYLLEAKEAENITTGCAEHCSLNENITVPDTKVNFYAWKRMEVGQQAVEVWQGLALLSEAVLRGQALLVNSSQPWEPLQLHVDKAVSGLRSLTTLLRALGAQKEAISPPDAASAAPLRTITADTFRKLFRVYRNFLRGKLKLYTGEACRTGDR

SEQ ID NO: 1858 - protein, 166 aa, Homo sapiens
  EPO_F148I
APPRLICDSRVLERYLLEAKEAENITTGCAEHCSLNENITVPDTKVNFYAWKRMEVGQQAVEVWQGLALLSEAVLRGQALLVNSSQPWEPLQLHVDKAVSGLRSLTTLLRALGAQKEAISPPDAASAAPLRTITADTFRKLFRVYSNILRGKLKLYTGEACRTGDR

SEQ ID NO: 1859 - protein, 166 aa, Homo sapiens
  EPO_F148V
APPRLICDSRVLERYLLEAKEAENITTGCAEHCSLNENITVPDTKVNFYAWKRMEVGQQAVEVWQGLALLSEAVLRGQALLVNSSQPWEPLQLHVDKAVSGLRSLTTLLRALGAQKEAISPPDAASAAPLRTITADTFRKLFRVYSNVLRGKLKLYTGEACRTGDR

SEQ ID NO: 1860 - protein, 166 aa, Homo sapiens
  EPO_L149I
APPRLICDSRVLERYLLEAKEAENITTGCAEHCSLNENITVPDTKVNFYAWKRMEVGQQAVEVWQGLALLSEAVLRGQALLVNSSQPWEPLQLHVDKAVSGLRSLTTLLRALGAQKEAISPPDAASAAPLRTITADTFRKLFRVYSNFIRGKLKLYTGEACRTGDR

SEQ ID NO: 1861 - protein, 166 aa, Homo sapiens
  EPO_L149V
APPRLICDSRVLERYLLEAKEAENITTGCAEHCSLNENITVPDTKVNFYAWKRMEVGQQAVEVWQGLALLSEAVLRGQALLVNSSQPWEPLQLHVDKAVSGLRSLTTLLRALGAQKEAISPPDAASAAPLRTITADTFRKLFRVYSNFVRGKLKLYTGEACRTGDR

SEQ ID NO: 1862 - protein, 166 aa, Homo sapiens
  EPO_R150H
APPRLICDSRVLERYLLEAKEAENITTGCAEHCSLNENITVPDTKVNFYAWKRMEVGQQAVEVWQGLALLSEAVLRGQALLVNSSQPWEPLQLHVDKAVSGLRSLTTLLRALGAQKEAISPPDAASAAPLRTITADTFRKLFRVYSNFLHGKLKLYTGEACRTGDR

SEQ ID NO: 1863 - protein, 166 aa, Homo sapiens
  EPO_R150Q
APPRLICDSRVLERYLLEAKEAENITTGCAEHCSLNENITVPDTKVNFYAWKRMEVGQQAVEVWQGLALLSEAVLRGQALLVNSSQPWEPLQLHVDKAVSGLRSLTTLLRALGAQKEAISPPDAASAAPLRTITADTFRKLFRVYSNFLQGKLKLYTGEACRTGDR

SEQ ID NO: 1864 - protein, 166 aa, Homo sapiens
  EPO_K152Q
APPRLICDSRVLERYLLEAKEAENITTGCAEHCSLNENITVPDTKVNFYAWKRMEVGQQAVEVWQGLALLSEAVLRGQALLVNSSQPWEPLQLHVDKAVSGLRSLTTLLRALGAQKEAISPPDAASAAPLRTITADTFRKLFRVYSNFLRGQLKLYTGEACRTGDR

SEQ ID NO: 1865 - protein, 166 aa, Homo sapiens
  EPO_K152T
APPRLICDSRVLERYLLEAKEAENITTGCAEHCSLNENITVPDTKVNFYAWKRMEVGQQAVEVWQGLALLSEAVLRGQALLVNSSQPWEPLQLHVDKAVSGLRSLTTLLRALGAQKEAISPPDAASAAPLRTITADTFRKLFRVYSNFLRGTLKLYTGEACRTGDR

SEQ ID NO: 1866 - protein, 166 aa, Homo sapiens
  EPO_K152N
APPRLICDSRVLERYLLEAKEAENITTGCAEHCSLNENITVPDTKVNFYAWKRMEVGQQAVEVWQGLALLSEAVLRGQALLVNSSQPWEPLQLHVDKAVSGLRSLTTLLRALGAQKEAISPPDAASAAPLRTITADTFRKLFRVYSNFLRGNLKLYTGEACRTGDR

SEQ ID NO: 1867 - protein, 166 aa, Homo sapiens
  EPO_L153I
APPRLICDSRVLERYLLEAKEAENITTGCAEHCSLNENITVPDTKVNFYAWKRMEVGQQAVEVWQGLALLSEAVLRGQALLVNSSQPWEPLQLHVDKAVSGLRSLTTLLRALGAQKEAISPPDAASAAPLRTITADTFRKLFRVYSNFLRGKIKLYTGEACRTGDR

SEQ ID NO: 1868 - protein, 166 aa, Homo sapiens
  EPO_L153V
APPRLICDSRVLERYLLEAKEAENITTGCAEHCSLNENITVPDTKVNFYAWKRMEVGQQAVEVWQGLALLSEAVLRGQALLVNSSQPWEPLQLHVDKAVSGLRSLTTLLRALGAQKEAISPPDAASAAPLRTITADTFRKLFRVYSNFLRGKVKLYTGEACRTGDR

SEQ ID NO: 1869 - protein, 166 aa, Homo sapiens
  EPO_K154Q
APPRLICDSRVLERYLLEAKEAENITTGCAEHCSLNENITVPDTKVNFYAWKRMEVGQQAVEVWQGLALLSEAVLRGQALLVNSSQPWEPLQLHVDKAVSGLRSLTTLLRALGAQKEAISPPDAASAAPLRTITADTFRKLFRVYSNFLRGKLQLYTGEACRTGDR

SEQ ID NO: 1870 - protein, 166 aa, Homo sapiens
  EPO_K154T
APPRLICDSRVLERYLLEAKEAENITTGCAEHCSLNENITVPDTKVNFYAWKRMEVGQQAVEVWQGLALLSEAVLRGQALLVNSSQPWEPLQLHVDKAVSGLRSLTTLLRALGAQKEAISPPDAASAAPLRTITADTFRKLFRVYSNFLRGKLTLYTGEACRTGDR

SEQ ID NO: 1871 - protein, 166 aa, Homo sapiens
  EPO_K154N
APPRLICDSRVLERYLLEAKEAENITTGCAEHCSLNENITVPDTKVNFYAWKRMEVGQQAVEVWQGLALLSEAVLRGQALLVNSSQPWEPLQLHVDKAVSGLRSLTTLLRALGAQKEAISPPDAASAAPLRTITADTFRKLFRVYSNFLRGKLNLYTGEACRTGDR

SEQ ID NO: 1872 - protein, 166 aa, Homo sapiens
  EPO_L155V
APPRLICDSRVLERYLLEAKEAENITTGCAEHCSLNENITVPDTKVNFYAWKRMEVGQQAVEVWQGLALLSEAVLRGQALLVNSSQPWEPLQLHVDKAVSGLRSLTTLLRALGAQKEAISPPDAASAAPLRTITADTFRKLFRVYSNFLRGKLKVYTGEACRTGDR

SEQ ID NO: 1873 - protein, 166 aa, Homo sapiens
  EPO_L155I
APPRLICDSRVLERYLLEAKEAENITTGCAEHCSLNENITVPDTKVNFYAWKRMEVGQQAVEVWQGLALLSEAVLRGQALLVNSSQPWEPLQLHVDKAVSGLRSLTTLLRALGAQKEAISPPDAASAAPLRTITADTFRKLFRVYSNFLRGKLKIYTGEACRTGDR

SEQ ID NO: 1874 - protein, 166 aa, Homo sapiens
  EPO_Y156H
APPRLICDSRVLERYLLEAKEAENITTGCAEHCSLNENITVPDTKVNFYAWKRMEVGQQAVEVWQGLALLSEAVLRGQALLVNSSQPWEPLQLHVDKAVSGLRSLTTLLRALGAQKEAISPPDAASAAPLRTITADTFRKLFRVYSNFLRGKLKLHTGEACRTGDR

SEQ ID NO: 1875 - protein, 166 aa, Homo sapiens
  EPO_Y156I
APPRLICDSRVLERYLLEAKEAENITTGCAEHCSLNENITVPDTKVNFYAWKRMEVGQQAVEVWQGLALLSEAVLRGQALLVNSSQPWEPLQLHVDKAVSGLRSLTTLLRALGAQKEAISPPDAASAAPLRTITADTFRKLFRVYSNFLRGKLKLITGEACRTGDR

SEQ ID NO: 1876 - protein, 166 aa, Homo sapiens
  EPO_E159Q
APPRLICDSRVLERYLLEAKEAENITTGCAEHCSLNENITVPDTKVNFYAWKRMEVGQQAVEVWQGLALLSEAVLRGQALLVNSSQPWEPLQLHVDKAVSGLRSLTTLLRALGAQKEAISPPDAASAAPLRTITADTFRKLFRVYSNFLRGKLKLYTGQACRTGDR

SEQ ID NO: 1877 - protein, 166 aa, Homo sapiens
  EPO_E159H
APPRLICDSRVLERYLLEAKEAENITTGCAEHCSLNENITVPDTKVNFYAWKRMEVGQQAVEVWQGLALLSEAVLRGQALLVNSSQPWEPLQLHVDKAVSGLRSLTTLLRALGAQKEAISPPDAASAAPLRTITADTFRKLFRVYSNFLRGKLKLYTGHACRTGDR

SEQ ID NO: 1878 - protein, 166 aa, Homo sapiens
  EPO_E159N
APPRLICDSRVLERYLLEAKEAENITTGCAEHCSLNENITVPDTKVNFYAWKRMEVGQQAVEVWQGLALLSEAVLRGQALLVNSSQPWEPLQLHVDKAVSGLRSLTTLLRALGAQKEAISPPDAASAAPLRTITADTFRKLFRVYSNFLRGKLKLYTGNACRTGDR

SEQ ID NO: 1879 - protein, 166 aa, Homo sapiens
  EPO_R162H
APPRLICDSRVLERYLLEAKEAENITTGCAEHCSLNENITVPDTKVNFYAWKRMEVGQQAVEVWQGLALLSEAVLRGQALLVNSSQPWEPLQLHVDKAVSGLRSLTTLLRALGAQKEAISPPDAASAAPLRTITADTFRKLFRVYSNFLRGKLKLYTGEACHTGDR

SEQ ID NO: 1880 - protein, 166 aa, Homo sapiens
  EPO_R162Q
APPRLICDSRVLERYLLEAKEAENITTGCAEHCSLNENITVPDTKVNFYAWKRMEVGQQAVEVWQGLALLSEAVLRGQALLVNSSQPWEPLQLHVDKAVSGLRSLTTLLRALGAQKEAISPPDAASAAPLRTITADTFRKLFRVYSNFLRGKLKLYTGEACQTGDR

SEQ ID NO: 1881 - protein, 166 aa, Homo sapiens
  EPO_D165N
APPRLICDSRVLERYLLEAKEAENITTGCAEHCSLNENITVPDTKVNFYAWKRMEVGQQAVEVWQGLALLSEAVLRGQALLVNSSQPWEPLQLHVDKAVSGLRSLTTLLRALGAQKEAISPPDAASAAPLRTITADTFRKLFRVYSNFLRGKLKLYTGEACRTGNR

SEQ ID NO: 1882 - protein, 166 aa, Homo sapiens
  EPO_D165Q
APPRLICDSRVLERYLLEAKEAENITTGCAEHCSLNENITVPDTKVNFYAWKRMEVGQQAVEVWQGLALLSEAVLRGQALLVNSSQPWEPLQLHVDKAVSGLRSLTTLLRALGAQKEAISPPDAASAAPLRTITADTFRKLFRVYSNFLRGKLKLYTGEACRTGQR

SEQ ID NO: 1883 - protein, 166 aa, Homo sapiens
  EPO_D165H
APPRLICDSRVLERYLLEAKEAENITTGCAEHCSLNENITVPDTKVNFYAWKRMEVGQQAVEVWQGLALLSEAVLRGQALLVNSSQPWEPLQLHVDKAVSGLRSLTTLLRALGAQKEAISPPDAASAAPLRTITADTFRKLFRVYSNFLRGKLKLYTGEACRTGHR

SEQ ID NO: 1884 - protein, 166 aa, Homo sapiens
  EPO_R166H
APPRLICDSRVLERYLLEAKEAENITTGCAEHCSLNENITVPDTKVNFYAWKRMEVGQQAVEVWQGLALLSEAVLRGQALLVNSSQPWEPLQLHVDKAVSGLRSLTTLLRALGAQKEAISPPDAASAAPLRTITADTFRKLFRVYSNFLRGKLKLYTGEACRTGDH

SEQ ID NO: 1885 - protein, 166 aa, Homo sapiens
  EPO_R166Q
APPRLICDSRVLERYLLEAKEAENITTGCAEHCSLNENITVPDTKVNFYAWKRMEVGQQAVEVWQGLALLSEAVLRGQALLVNSSQPWEPLQLHVDKAVSGLRSLTTLLRALGAQKEAISPPDAASAAPLRTITADTFRKLFRVYSNFLRGKLKLYTGEACRTGDQ

SEQ ID NO: 1886 - protein, 166 aa, Homo sapiens
  EPO_WT
APPRLICDSRVLERYLLEAKEAENITTGCAEHCSLNENITVPDTKVNFYAWKRMEVGQQAVEVWQGLALLSEAVLRGQALLVNSSQPWEPLQLHVDKAVSGLRSLTTLLRALGAQKEAISPPDAASAAPLRTITADTFRKLFRVYSNFLRGKLKLYTGEACRTGDR

SEQ ID NO: 1887 - protein, 166 aa, Homo sapiens
  IFN-beta_L6H
MSYNLHGFLQRSSNFQCQKLLWQLNGRLEYCLKDRMNFDIPEEIKQLQQFQKEDAALTIYEMLQNIFAIFRQDSSSTGWNETIVENLLANVYHQINHLKTVLEEKLEKEDFTRGKLMSSLHLKRYYGRILHYLKAKEYSHCAWTIVRVEILRNFYFINRLTGYLRN

SEQ ID NO: 1888 - protein, 166 aa, Homo sapiens
  IFN-beta_L6A
MSYNLAGFLQRSSNFQCQKLLWQLNGRLEYCLKDRMNFDIPEEIKQLQQFQKEDAALTIYEMLQNIFAIFRQDSSSTGWNETIVENLLANVYHQINHLKTVLEEKLEKEDFTRGKLMSSLHLKRYYGRILHYLKAKEYSHCAWTIVRVEILRNFYFINRLTGYLRN

SEQ ID NO: 1889 - protein, 166 aa, Homo sapiens
  IFN-beta_L20H
MSYNLLGFLQRSSNFQCQKHLWQLNGRLEYCLKDRMNFDIPEEIKQLQQFQKEDAALTIYEMLQNIFAIFRQDSSSTGWNETIVENLLANVYHQINHLKTVLEEKLEKEDFTRGKLMSSLHLKRYYGRILHYLKAKEYSHCAWTIVRVEILRNFYFINRLTGYLRN

SEQ ID NO: 1890 - protein, 166 aa, Homo sapiens
  IFN-beta_L20A
MSYNLLGFLQRSSNFQCQKALWQLNGRLEYCLKDRMNFDIPEEIKQLQQFQKEDAALTIYEMLQNIFAIFRQDSSSTGWNETIVENLLANVYHQINHLKTVLEEKLEKEDFTRGKLMSSLHLKRYYGRILHYLKAKEYSHCAWTIVRVEILRNFYFINRLTGYLRN

SEQ ID NO: 1891 - protein, 166 aa, Homo sapiens
  IFN-beta_L21T
MSYNLLGFLQRSSNFQCQKLTWQLNGRLEYCLKDRMNFDIPEEIKQLQQFQKEDAALTIYEMLQNIFAIFRQDSSSTGWNETIVENLLANVYHQINHLKTVLEEKLEKEDFTRGKLMSSLHLKRYYGRILHYLKAKEYSHCAWTIVRVEILRNFYFINRLTGYLRN

SEQ ID NO: 1892 - protein, 166 aa, Homo sapiens
  IFN-beta_L21Q
MSYNLLGFLQRSSNFQCQKLQWQLNGRLEYCLKDRMNFDIPEEIKQLQQFQKEDAALTIYEMLQNIFAIFRQDSSSTGWNETIVENLLANVYHQINHLKTVLEEKLEKEDFTRGKLMSSLHLKRYYGRILHYLKAKEYSHCAWTIVRVEILRNFYFINRLTGYLRN

SEQ ID NO: 1893 - protein, 166 aa, Homo sapiens
  IFN-beta_L21H
MSYNLLGFLQRSSNFQCQKLHWQLNGRLEYCLKDRMNFDIPEEIKQLQQFQKEDAALTIYEMLQNIFAIFRQDSSSTGWNETIVENLLANVYHQINHLKTVLEEKLEKEDFTRGKLMSSLHLKRYYGRILHYLKAKEYSHCAWTIVRVEILRNFYFINRLTGYLRN

SEQ ID NO: 1894 - protein, 166 aa, Homo sapiens
  IFN-beta_L21A
MSYNLLGFLQRSSNFQCQKLAWQLNGRLEYCLKDRMNFDIPEEIKQLQQFQKEDAALTIYEMLQNIFAIFRQDSSSTGWNETIVENLLANVYHQINHLKTVLEEKLEKEDFTRGKLMSSLHLKRYYGRILHYLKAKEYSHCAWTIVRVEILRNFYFINRLTGYLRN

SEQ ID NO: 1895 - protein, 166 aa, Homo sapiens
  IFN-beta_L24T
MSYNLLGFLQRSSNFQCQKLLWQTNGRLEYCLKDRMNFDIPEEIKQLQQFQKEDAALTIYEMLQNIFAIFRQDSSSTGWNETIVENLLANVYHQINHLKTVLEEKLEKEDFTRGKLMSSLHLKRYYGRILHYLKAKEYSHCAWTIVRVEILRNFYFINRLTGYLRN

SEQ ID NO: 1896 - protein, 166 aa, Homo sapiens
  IFN-beta_L24Q
MSYNLLGFLQRSSNFQCQKLLWQQNGRLEYCLKDRMNFDIPEEIKQLQQFQKEDAALTIYEMLQNIFAIFRQDSSSTGWNETIVENLLANVYHQINHLKTVLEEKLEKEDFTRGKLMSSLHLKRYYGRILHYLKAKEYSHCAWTIVRVEILRNFYFINRLTGYLRN

SEQ ID NO: 1897 - protein, 166 aa, Homo sapiens
  IFN-beta_L24H
MSYNLLGFLQRSSNFQCQKLLWQHNGRLEYCLKDRMNFDIPEEIKQLQQFQKEDAALTIYEMLQNIFAIFRQDSSSTGWNETIVENLLANVYHQINHLKTVLEEKLEKEDFTRGKLMSSLHLKRYYGRILHYLKAKEYSHCAWTIVRVEILRNFYFINRLTGYLRN

SEQ ID NO: 1898 - protein, 166 aa, Homo sapiens
  IFN-beta_L24A
MSYNLLGFLQRSSNFQCQKLLWQANGRLEYCLKDRMNFDIPEEIKQLQQFQKEDAALTIYEMLQNIFAIFRQDSSSTGWNETIVENLLANVYHQINHLKTVLEEKLEKEDFTRGKLMSSLHLKRYYGRILHYLKAKEYSHCAWTIVRVEILRNFYFINRLTGYLRN

SEQ ID NO: 1899 - protein, 166 aa, Homo sapiens
  IFN-beta_D34G
MSYNLLGFLQRSSNFQCQKLLWQLNGRLEYCLKGRMNFDIPEEIKQLQQFQKEDAALTIYEMLQNIFAIFRQDSSSTGWNETIVENLLANVYHQINHLKTVLEEKLEKEDFTRGKLMSSLHLKRYYGRILHYLKAKEYSHCAWTIVRVEILRNFYFINRLTGYLRN

SEQ ID NO: 1900 - protein, 166 aa, Homo sapiens
  IFN-beta_D54G
MSYNLLGFLQRSSNFQCQKLLWQLNGRLEYCLKDRMNFDIPEEIKQLQQFQKEGAALTIYEMLQNIFAIFRQDSSSTGWNETIVENLLANVYHQINHLKTVLEEKLEKEDFTRGKLMSSLHLKRYYGRILHYLKAKEYSHCAWTIVRVEILRNFYFINRLTGYLRN

SEQ ID NO: 1901 - protein, 166 aa, Homo sapiens
  IFN-beta_L57T
MSYNLLGFLQRSSNFQCQKLLWQLNGRLEYCLKDRMNFDIPEEIKQLQQFQKEDAATTIYEMLQNIFAIFRQDSSSTGWNETIVENLLANVYHQINHLKTVLEEKLEKEDFTRGKLMSSLHLKRYYGRILHYLKAKEYSHCAWTIVRVEILRNFYFINRLTGYLRN

SEQ ID NO: 1902 - protein, 166 aa, Homo sapiens
  IFN-beta_L57Q
MSYNLLGFLQRSSNFQCQKLLWQLNGRLEYCLKDRMNFDIPEEIKQLQQFQKEDAAQTIYEMLQNIFAIFRQDSSSTGWNETIVENLLANVYHQINHLKTVLEEKLEKEDFTRGKLMSSLHLKRYYGRILHYLKAKEYSHCAWTIVRVEILRNFYFINRLTGYLRN

SEQ ID NO: 1903 - protein, 166 aa, Homo sapiens
  IFN-beta_L57H
MSYNLLGFLQRSSNFQCQKLLWQLNGRLEYCLKDRMNFDIPEEIKQLQQFQKEDAAHTIYEMLQNIFAIFRQDSSSTGWNETIVENLLANVYHQINHLKTVLEEKLEKEDFTRGKLMSSLHLKRYYGRILHYLKAKEYSHCAWTIVRVEILRNFYFINRLTGYLRN

SEQ ID NO: 1904 - protein, 166 aa, Homo sapiens
  IFN-beta_L57A
MSYNLLGFLQRSSNFQCQKLLWQLNGRLEYCLKDRMNFDIPEEIKQLQQFQKEDAAATIYEMLQNIFAIFRQDSSSTGWNETIVENLLANVYHQINHLKTVLEEKLEKEDFTRGKLMSSLHLKRYYGRILHYLKAKEYSHCAWTIVRVEILRNFYFINRLTGYLRN

SEQ ID NO: 1905 - protein, 166 aa, Homo sapiens
  IFN-beta_M62T
MSYNLLGFLQRSSNFQCQKLLWQLNGRLEYCLKDRMNFDIPEEIKQLQQFQKEDAALTIYETLQNIFAIFRQDSSSTGWNETIVENLLANVYHQINHLKTVLEEKLEKEDFTRGKLMSSLHLKRYYGRILHYLKAKEYSHCAWTIVRVEILRNFYFINRLTGYLRN

SEQ ID NO: 1906 - protein, 166 aa, Homo sapiens
  IFN-beta_M62Q
MSYNLLGFLQRSSNFQCQKLLWQLNGRLEYCLKDRMNFDIPEEIKQLQQFQKEDAALTIYEQLQNIFAIFRQDSSSTGWNETIVENLLANVYHQINHLKTVLEEKLEKEDFTRGKLMSSLHLKRYYGRILHYLKAKEYSHCAWTIVRVEILRNFYFINRLTGYLRN

SEQ ID NO: 1907 - protein, 166 aa, Homo sapiens
  IFN-beta_M62A
MSYNLLGFLQRSSNFQCQKLLWQLNGRLEYCLKDRMNFDIPEEIKQLQQFQKEDAALTIYEALQNIFAIFRQDSSSTGWNETIVENLLANVYHQINHLKTVLEEKLEKEDFTRGKLMSSLHLKRYYGRILHYLKAKEYSHCAWTIVRVEILRNFYFINRLTGYLRN

SEQ ID NO: 1908 - protein, 166 aa, Homo sapiens
  IFN-beta_L63T
MSYNLLGFLQRSSNFQCQKLLWQLNGRLEYCLKDRMNFDIPEEIKQLQQFQKEDAALTIYEMTQNIFAIFRQDSSSTGWNETIVENLLANVYHQINHLKTVLEEKLEKEDFTRGKLMSSLHLKRYYGRILHYLKAKEYSHCAWTIVRVEILRNFYFINRLTGYLRN

SEQ ID NO: 1909 - protein, 166 aa, Homo sapiens
  IFN-beta_L63Q
MSYNLLGFLQRSSNFQCQKLLWQLNGRLEYCLKDRMNFDIPEEIKQLQQFQKEDAALTIYEMQQNIFAIFRQDSSSTGWNETIVENLLANVYHQINHLKTVLEEKLEKEDFTRGKLMSSLHLKRYYGRILHYLKAKEYSHCAWTIVRVEILRNFYFINRLTGYLRN

SEQ ID NO: 1910 - protein, 166 aa, Homo sapiens
  IFN-beta_L63H
MSYNLLGFLQRSSNFQCQKLLWQLNGRLEYCLKDRMNFDIPEEIKQLQQFQKEDAALTIYEMHQNIFAIFRQDSSSTGWNETIVENLLANVYHQINHLKTVLEEKLEKEDFTRGKLMSSLHLKRYYGRILHYLKAKEYSHCAWTIVRVEILRNFYFINRLTGYLRN

SEQ ID NO: 1911 - protein, 166 aa, Homo sapiens
  IFN-beta_L63A
MSYNLLGFLQRSSNFQCQKLLWQLNGRLEYCLKDRMNFDIPEEIKQLQQFQKEDAALTIYEMAQNIFAIFRQDSSSTGWNETIVENLLANVYHQINHLKTVLEEKLEKEDFTRGKLMSSLHLKRYYGRILHYLKAKEYSHCAWTIVRVEILRNFYFINRLTGYLRN

SEQ ID NO: 1912 - protein, 166 aa, Homo sapiens
  IFN-beta_L87H
MSYNLLGFLQRSSNFQCQKLLWQLNGRLEYCLKDRMNFDIPEEIKQLQQFQKEDAALTIYEMLQNIFAIFRQDSSSTGWNETIVENHLANVYHQINHLKTVLEEKLEKEDFTRGKLMSSLHLKRYYGRILHYLKAKEYSHCAWTIVRVEILRNFYFINRLTGYLRN

SEQ ID NO: 1913 - protein, 166 aa, Homo sapiens
  IFN-beta_L87A
MSYNLLGFLQRSSNFQCQKLLWQLNGRLEYCLKDRMNFDIPEEIKQLQQFQKEDAALTIYEMLQNIFAIFRQDSSSTGWNETIVENALANVYHQINHLKTVLEEKLEKEDFTRGKLMSSLHLKRYYGRILHYLKAKEYSHCAWTIVRVEILRNFYFINRLTGYLRN

SEQ ID NO: 1914 - protein, 166 aa, Homo sapiens
  IFN-beta_L88T
MSYNLLGFLQRSSNFQCQKLLWQLNGRLEYCLKDRMNFDIPEEIKQLQQFQKEDAALTIYEMLQNIFAIFRQDSSSTGWNETIVENLTANVYHQINHLKTVLEEKLEKEDFTRGKLMSSLHLKRYYGRILHYLKAKEYSHCAWTIVRVEILRNFYFINRLTGYLRN

SEQ ID NO: 1915 - protein, 166 aa, Homo sapiens
  IFN-beta_L88Q
MSYNLLGFLQRSSNFQCQKLLWQLNGRLEYCLKDRMNFDIPEEIKQLQQFQKEDAALTIYEMLQNIFAIFRQDSSSTGWNETIVENLQANVYHQINHLKTVLEEKLEKEDFTRGKLMSSLHLKRYYGRILHYLKAKEYSHCAWTIVRVEILRNFYFINRLTGYLRN

SEQ ID NO: 1916 - protein, 166 aa, Homo sapiens
  IFN-beta_L88H
MSYNLLGFLQRSSNFQCQKLLWQLNGRLEYCLKDRMNFDIPEEIKQLQQFQKEDAALTIYEMLQNIFAIFRQDSSSTGWNETIVENLHANVYHQINHLKTVLEEKLEKEDFTRGKLMSSLHLKRYYGRILHYLKAKEYSHCAWTIVRVEILRNFYFINRLTGYLRN

SEQ ID NO: 1917 - protein, 166 aa, Homo sapiens
  IFN-beta_L88A
MSYNLLGFLQRSSNFQCQKLLWQLNGRLEYCLKDRMNFDIPEEIKQLQQFQKEDAALTIYEMLQNIFAIFRQDSSSTGWNETIVENLAANVYHQINHLKTVLEEKLEKEDFTRGKLMSSLHLKRYYGRILHYLKAKEYSHCAWTIVRVEILRNFYFINRLTGYLRN

SEQ ID NO: 1918 - protein, 166 aa, Homo sapiens
  IFN-beta_L98H
MSYNLLGFLQRSSNFQCQKLLWQLNGRLEYCLKDRMNFDIPEEIKQLQQFQKEDAALTIYEMLQNIFAIFRQDSSSTGWNETIVENLLANVYHQINHHKTVLEEKLEKEDFTRGKLMSSLHLKRYYGRILHYLKAKEYSHCAWTIVRVEILRNFYFINRLTGYLRN

SEQ ID NO: 1919 - protein, 166 aa, Homo sapiens
  IFN-beta_L98A
MSYNLLGFLQRSSNFQCQKLLWQLNGRLEYCLKDRMNFDIPEEIKQLQQFQKEDAALTIYEMLQNIFAIFRQDSSSTGWNETIVENLLANVYHQINHAKTVLEEKLEKEDFTRGKLMSSLHLKRYYGRILHYLKAKEYSHCAWTIVRVEILRNFYFINRLTGYLRN

SEQ ID NO: 1920 - protein, 166 aa, Homo sapiens
  IFN-beta_L102T
MSYNLLGFLQRSSNFQCQKLLWQLNGRLEYCLKDRMNFDIPEEIKQLQQFQKEDAALTIYEMLQNIFAIFRQDSSSTGWNETIVENLLANVYHQINHLKTVTEEKLEKEDFTRGKLMSSLHLKRYYGRILHYLKAKEYSHCAWTIVRVEILRNFYFINRLTGYLRN

SEQ ID NO: 1921 - protein, 166 aa, Homo sapiens
  IFN-beta_L102Q
MSYNLLGFLQRSSNFQCQKLLWQLNGRLEYCLKDRMNFDIPEEIKQLQQFQKEDAALTIYEMLQNIFAIFRQDSSSTGWNETIVENLLANVYHQINHLKTVQEEKLEKEDFTRGKLMSSLHLKRYYGRILHYLKAKEYSHCAWTIVRVEILRNFYFINRLTGYLRN

SEQ ID NO: 1922 - protein, 166 aa, Homo sapiens
  IFN-beta_L102H
MSYNLLGFLQRSSNFQCQKLLWQLNGRLEYCLKDRMNFDIPEEIKQLQQFQKEDAALTIYEMLQNIFAIFRQDSSSTGWNETIVENLLANVYHQINHLKTVHEEKLEKEDFTRGKLMSSLHLKRYYGRILHYLKAKEYSHCAWTIVRVEILRNFYFINRLTGYLRN

SEQ ID NO: 1923 - protein, 166 aa, Homo sapiens
  IFN-beta_L102A
MSYNLLGFLQRSSNFQCQKLLWQLNGRLEYCLKDRMNFDIPEEIKQLQQFQKEDAALTIYEMLQNIFAIFRQDSSSTGWNETIVENLLANVYHQINHLKTVAEEKLEKEDFTRGKLMSSLHLKRYYGRILHYLKAKEYSHCAWTIVRVEILRNFYFINRLTGYLRN

SEQ ID NO: 1924 - protein, 166 aa, Homo sapiens
  IFN-beta_L106T
MSYNLLGFLQRSSNFQCQKLLWQLNGRLEYCLKDRMNFDIPEEIKQLQQFQKEDAALTIYEMLQNIFAIFRQDSSSTGWNETIVENLLANVYHQINHLKTVLEEKTEKEDFTRGKLMSSLHLKRYYGRILHYLKAKEYSHCAWTIVRVEILRNFYFINRLTGYLRN

SEQ ID NO: 1925 - protein, 166 aa, Homo sapiens
  IFN-beta_L106Q
MSYNLLGFLQRSSNFQCQKLLWQLNGRLEYCLKDRMNFDIPEEIKQLQQFQKEDAALTIYEMLQNIFAIFRQDSSSTGWNETIVENLLANVYHQINHLKTVLEEKQEKEDFTRGKLMSSLHLKRYYGRILHYLKAKEYSHCAWTIVRVEILRNFYFINRLTGYLRN

SEQ ID NO: 1926 - protein, 166 aa, Homo sapiens
  IFN-beta_L106H
MSYNLLGFLQRSSNFQCQKLLWQLNGRLEYCLKDRMNFDIPEEIKQLQQFQKEDAALTIYEMLQNIFAIFRQDSSSTGWNETIVENLLANVYHQINHLKTVLEEKHEKEDFTRGKLMSSLHLKRYYGRILHYLKAKEYSHCAWTIVRVEILRNFYFINRLTGYLRN

SEQ ID NO: 1927 - protein, 166 aa, Homo sapiens
  IFN-beta_L106A
MSYNLLGFLQRSSNFQCQKLLWQLNGRLEYCLKDRMNFDIPEEIKQLQQFQKEDAALTIYEMLQNIFAIFRQDSSSTGWNETIVENLLANVYHQINHLKTVLEEKAEKEDFTRGKLMSSLHLKRYYGRILHYLKAKEYSHCAWTIVRVEILRNFYFINRLTGYLRN

SEQ ID NO: 1928 - protein, 166 aa, Homo sapiens
  IFN-beta_K115S
MSYNLLGFLQRSSNFQCQKLLWQLNGRLEYCLKDRMNFDIPEEIKQLQQFQKEDAALTIYEMLQNIFAIFRQDSSSTGWNETIVENLLANVYHQINHLKTVLEEKLEKEDFTRGSLMSSLHLKRYYGRILHYLKAKEYSHCAWTIVRVEILRNFYFINRLTGYLRN

SEQ ID NO: 1929 - protein, 166 aa, Homo sapiens
  IFN-beta_K115H
MSYNLLGFLQRSSNFQCQKLLWQLNGRLEYCLKDRMNFDIPEEIKQLQQFQKEDAALTIYEMLQNIFAIFRQDSSSTGWNETIVENLLANVYHQINHLKTVLEEKLEKEDFTRGHLMSSLHLKRYYGRILHYLKAKEYSHCAWTIVRVEILRNFYFINRLTGYLRN

SEQ ID NO: 1930 - protein, 166 aa, Homo sapiens; identical to SEQ ID NO: 337
  IFN-beta_K115N

SEQ ID NO: 1931 - protein, 166 aa, Homo sapiens
  IFN-beta_M117T
MSYNLLGFLQRSSNFQCQKLLWQLNGRLEYCLKDRMNFDIPEEIKQLQQFQKEDAALTIYEMLQNIFAIFRQDSSSTGWNETIVENLLANVYHQINHLKTVLEEKLEKEDFTRGKLTSSLHLKRYYGRILHYLKAKEYSHCAWTIVRVEILRNFYFINRLTGYLRN

SEQ ID NO: 1932 - protein, 166 aa, Homo sapiens
  IFN-beta_M117Q
MSYNLLGFLQRSSNFQCQKLLWQLNGRLEYCLKDRMNFDIPEEIKQLQQFQKEDAALTIYEMLQNIFAIFRQDSSSTGWNETIVENLLANVYHQINHLKTVLEEKLEKEDFTRGKLQSSLHLKRYYGRILHYLKAKEYSHCAWTIVRVEILRNFYFINRLTGYLRN

SEQ ID NO: 1933 - protein, 166 aa, Homo sapiens
  IFN-beta_M117A
MSYNLLGFLQRSSNFQCQKLLWQLNGRLEYCLKDRMNFDIPEEIKQLQQFQKEDAALTIYEMLQNIFAIFRQDSSSTGWNETIVENLLANVYHQINHLKTVLEEKLEKEDFTRGKLASSLHLKRYYGRILHYLKAKEYSHCAWTIVRVEILRNFYFINRLTGYLRN

SEQ ID NO: 1934 - protein, 166 aa, Homo sapiens
  IFN-beta_L122T
MSYNLLGFLQRSSNFQCQKLLWQLNGRLEYCLKDRMNFDIPEEIKQLQQFQKEDAALTIYEMLQNIFAIFRQDSSSTGWNETIVENLLANVYHQINHLKTVLEEKLEKEDFTRGKLMSSLHTKRYYGRILHYLKAKEYSHCAWTIVRVEILRNFYFINRLTGYLRN

SEQ ID NO: 1935 - protein, 166 aa, Homo sapiens; identical to SEQ ID NO: 147
  IFN-beta_L122Q

SEQ ID NO: 1936 - protein, 166 aa, Homo sapiens
  IFN-beta_L122H
MSYNLLGFLQRSSNFQCQKLLWQLNGRLEYCLKDRMNFDIPEEIKQLQQFQKEDAALTIYEMLQNIFAIFRQDSSSTGWNETIVENLLANVYHQINHLKTVLEEKLEKEDFTRGKLMSSLHHKRYYGRILHYLKAKEYSHCAWTIVRVEILRNFYFINRLTGYLRN

SEQ ID NO: 1937 - protein, 166 aa, Homo sapiens
  IFN-beta_L122A
MSYNLLGFLQRSSNFQCQKLLWQLNGRLEYCLKDRMNFDIPEEIKQLQQFQKEDAALTIYEMLQNIFAIFRQDSSSTGWNETIVENLLANVYHQINHLKTVLEEKLEKEDFTRGKLMSSLHAKRYYGRILHYLKAKEYSHCAWTIVRVEILRNFYFINRLTGYLRN

SEQ ID NO: 1938 - protein, 166 aa, Homo sapiens
  IFN-beta_L133T
MSYNLLGFLQRSSNFQCQKLLWQLNGRLEYCLKDRMNFDIPEEIKQLQQFQKEDAALTIYEMLQNIFAIFRQDSSSTGWNETIVENLLANVYHQINHLKTVLEEKLEKEDFTRGKLMSSLHLKRYYGRILHYTKAKEYSHCAWTIVRVEILRNFYFINRLTGYLRN

SEQ ID NO: 1939 - protein, 166 aa, Homo sapiens
  IFN-beta_L133Q
MSYNLLGFLQRSSNFQCQKLLWQLNGRLEYCLKDRMNFDIPEEIKQLQQFQKEDAALTIYEMLQNIFAIFRQDSSSTGWNETIVENLLANVYHQINHLKTVLEEKLEKEDFTRGKLMSSLHLKRYYGRILHYQKAKEYSHCAWTIVRVEILRNFYFINRLTGYLRN

SEQ ID NO: 1940 - protein, 166 aa, Homo sapiens
  IFN-beta_L133H
MSYNLLGFLQRSSNFQCQKLLWQLNGRLEYCLKDRMNFDIPEEIKQLQQFQKEDAALTIYEMLQNIFAIFRQDSSSTGWNETIVENLLANVYHQINHLKTVLEEKLEKEDFTRGKLMSSLHLKRYYGRILHYHKAKEYSHCAWTIVRVEILRNFYFINRLTGYLRN

SEQ ID NO: 1941 - protein, 166 aa, Homo sapiens
  IFN-beta_L133A
MSYNLLGFLQRSSNFQCQKLLWQLNGRLEYCLKDRMNFDIPEEIKQLQQFQKEDAALTIYEMLQNIFAIFRQDSSSTGWNETIVENLLANVYHQINHLKTVLEEKLEKEDFTRGKLMSSLHLKRYYGRILHYAKAKEYSHCAWTIVRVEILRNFYFINRLTGYLRN

SEQ ID NO: 1942 - protein, 166 aa, Homo sapiens
  IFN-beta_L151T
MSYNLLGFLQRSSNFQCQKLLWQLNGRLEYCLKDRMNFDIPEEIKQLQQFQKEDAALTIYEMLQNIFAIFRQDSSSTGWNETIVENLLANVYHQINHLKTVLEEKLEKEDFTRGKLMSSLHLKRYYGRILHYLKAKEYSHCAWTIVRVEITRNFYFINRLTGYLRN

SEQ ID NO: 1943 - protein, 166 aa, Homo sapiens
  IFN-beta_L151Q
MSYNLLGFLQRSSNFQCQKLLWQLNGRLEYCLKDRMNFDIPEEIKQLQQFQKEDAALTIYEMLQNIFAIFRQDSSSTGWNETIVENLLANVYHQINHLKTVLEEKLEKEDFTRGKLMSSLHLKRYYGRILHYLKAKEYSHCAWTIVRVEIQRNFYFINRLTGYLRN

SEQ ID NO: 1944 - protein, 166 aa, Homo sapiens
  IFN-beta_L151H
MSYNLLGFLQRSSNFQCQKLLWQLNGRLEYCLKDRMNFDIPEEIKQLQQFQKEDAALTIYEMLQNIFAIFRQDSSSTGWNETIVENLLANVYHQINHLKTVLEEKLEKEDFTRGKLMSSLHLKRYYGRILHYLKAKEYSHCAWTIVRVEIHRNFYFINRLTGYLRN

SEQ ID NO: 1945 - protein, 166 aa, Homo sapiens
  IFN-beta_L151A
MSYNLLGFLQRSSNFQCQKLLWQLNGRLEYCLKDRMNFDIPEEIKQLQQFQKEDAALTIYEMLQNIFAIFRQDSSSTGWNETIVENLLANVYHQINHLKTVLEEKLEKEDFTRGKLMSSLHLKRYYGRILHYLKAKEYSHCAWTIVRVEIARNFYFINRLTGYLRN

SEQ ID NO: 1946 - protein, 166 aa, Homo sapiens
  IFN-beta_L160T
MSYNLLGFLQRSSNFQCQKLLWQLNGRLEYCLKDRMNFDIPEEIKQLQQFQKEDAALTIYEMLQNIFAIFRQDSSSTGWNETIVENLLANVYHQINHLKTVLEEKLEKEDFTRGKLMSSLHLKRYYGRILHYLKAKEYSHCAWTIVRVEILRNFYFINRTTGYLRN

SEQ ID NO: 1947 - protein, 166 aa, Homo sapiens
  IFN-beta_L160Q
MSYNLLGFLQRSSNFQCQKLLWQLNGRLEYCLKDRMNFDIPEEIKQLQQFQKEDAALTIYEMLQNIFAIFRQDSSSTGWNETIVENLLANVYHQINHLKTVLEEKLEKEDFTRGKLMSSLHLKRYYGRILHYLKAKEYSHCAWTIVRVEILRNFYFINRQTGYLRN

SEQ ID NO: 1948 - protein, 166 aa, Homo sapiens
  IFN-beta_L160H
MSYNLLGFLQRSSNFQCQKLLWQLNGRLEYCLKDRMNFDIPEEIKQLQQFQKEDAALTIYEMLQNIFAIFRQDSSSTGWNETIVENLLANVYHQINHLKTVLEEKLEKEDFTRGKLMSSLHLKRYYGRILHYLKAKEYSHCAWTIVRVEILRNFYFINRHTGYLRN

SEQ ID NO: 1949 - protein, 166 aa, Homo sapiens
  IFN-beta_L160A
MSYNLLGFLQRSSNFQCQKLLWQLNGRLEYCLKDRMNFDIPEEIKQLQQFQKEDAALTIYEMLQNIFAIFRQDSSSTGWNETIVENLLANVYHQINHLKTVLEEKLEKEDFTRGKLMSSLHLKRYYGRILHYLKAKEYSHCAWTIVRVEILRNFYFINRATGYLRN

SEQ ID NO: 1950 - protein, 166 aa, Homo sapiens
  IFN-beta_L164T
MSYNLLGFLQRSSNFQCQKLLWQLNGRLEYCLKDRMNFDIPEEIKQLQQFQKEDAALTIYEMLQNIFAIFRQDSSSTGWNETIVENLLANVYHQINHLKTVLEEKLEKEDFTRGKLMSSLHLKRYYGRILHYLKAKEYSHCAWTIVRVEILRNFYFINRLTGYTRN

SEQ ID NO: 1951 - protein, 166 aa, Homo sapiens
  IFN-beta_L164Q
MSYNLLGFLQRSSNFQCQKLLWQLNGRLEYCLKDRMNFDIPEEIKQLQQFQKEDAALTIYEMLQNIFAIFRQDSSSTGWNETIVENLLANVYHQINHLKTVLEEKLEKEDFTRGKLMSSLHLKRYYGRILHYLKAKEYSHCAWTIVRVEILRNFYFINRLTGYQRN

SEQ ID NO: 1952 - protein, 166 aa, Homo sapiens
  IFN-beta_L164H
MSYNLLGFLQRSSNFQCQKLLWQLNGRLEYCLKDRMNFDIPEEIKQLQQFQKEDAALTIYEMLQNIFAIFRQDSSSTGWNETIVENLLANVYHQINHLKTVLEEKLEKEDFTRGKLMSSLHLKRYYGRILHYLKAKEYSHCAWTIVRVEILRNFYFINRLTGYHRN

SEQ ID NO: 1953 - protein, 166 aa, Homo sapiens
  IFN-beta_L164A
MSYNLLGFLQRSSNFQCQKLLWQLNGRLEYCLKDRMNFDIPEEIKQLQQFQKEDAALTIYEMLQNIFAIFRQDSSSTGWNETIVENLLANVYHQINHLKTVLEEKLEKEDFTRGKLMSSLHLKRYYGRILHYLKAKEYSHCAWTIVRVEILRNFYFINRLTGYARN

SEQ ID NO: 1954 - protein, 166 aa, Homo sapiens
  IFN-beta_Q18H
MSYNLLGFLQRSSNFQCHKLLWQLNGRLEYCLKDRMNFDIPEEIKQLQQFQKEDAALTIYEMLQNIFAIFRQDSSSTGWNETIVENLLANVYHQINHLKTVLEEKLEKEDFTRGKLMSSLHLKRYYGRILHYLKAKEYSHCAWTIVRVEILRNFYFINRLTGYLRN

SEQ ID NO: 1955 - protein, 166 aa, Homo sapiens
  IFN-beta_Q18S
MSYNLLGFLQRSSNFQCSKLLWQLNGRLEYCLKDRMNFDIPEEIKQLQQFQKEDAALTIYEMLQNIFAIFRQDSSSTGWNETIVENLLANVYHQINHLKTVLEEKLEKEDFTRGKLMSSLHLKRYYGRILHYLKAKEYSHCAWTIVRVEILRNFYFINRLTGYLRN

SEQ ID NO: 1956 - protein, 166 aa, Homo sapiens
  IFN-beta_Q18T
MSYNLLGFLQRSSNFQCTKLLWQLNGRLEYCLKDRMNFDIPEEIKQLQQFQKEDAALTIYEMLQNIFAIFRQDSSSTGWNETIVENLLANVYHQINHLKTVLEEKLEKEDFTRGKLMSSLHLKRYYGRILHYLKAKEYSHCAWTIVRVEILRNFYFINRLTGYLRN

SEQ ID NO: 1957 - protein, 166 aa, Homo sapiens
  IFN-beta_Q18N
MSYNLLGFLQRSSNFQCNKLLWQLNGRLEYCLKDRMNFDIPEEIKQLQQFQKEDAALTIYEMLQNIFAIFRQDSSSTGWNETIVENLLANVYHQINHLKTVLEEKLEKEDFTRGKLMSSLHLKRYYGRILHYLKAKEYSHCAWTIVRVEILRNFYFINRLTGYLRN

SEQ ID NO: 1958 - protein, 166 aa, Homo sapiens
  IFN-beta_Q23H
MSYNLLGFLQRSSNFQCQKLLWHLNGRLEYCLKDRMNFDIPEEIKQLQQFQKEDAALTIYEMLQNIFAIFRQDSSSTGWNETIVENLLANVYHQINHLKTVLEEKLEKEDFTRGKLMSSLHLKRYYGRILHYLKAKEYSHCAWTIVRVEILRNFYFINRLTGYLRN

SEQ ID NO: 1959 - protein, 166 aa, Homo sapiens
  IFN-beta_Q23S
MSYNLLGFLQRSSNFQCQKLLWSLNGRLEYCLKDRMNFDIPEEIKQLQQFQKEDAALTIYEMLQNIFAIFRQDSSSTGWNETIVENLLANVYHQINHLKTVLEEKLEKEDFTRGKLMSSLHLKRYYGRILHYLKAKEYSHCAWTIVRVEILRNFYFINRLTGYLRN

SEQ ID NO: 1960 - protein, 166 aa, Homo sapiens
  IFN-beta_Q23T
MSYNLLGFLQRSSNFQCQKLLWTLNGRLEYCLKDRMNFDIPEEIKQLQQFQKEDAALTIYEMLQNIFAIFRQDSSSTGWNETIVENLLANVYHQINHLKTVLEEKLEKEDFTRGKLMSSLHLKRYYGRILHYLKAKEYSHCAWTIVRVEILRNFYFINRLTGYLRN

SEQ ID NO: 1961 - protein, 166 aa, Homo sapiens
  IFN-beta_Q23N
MSYNLLGFLQRSSNFQCQKLLWNLNGRLEYCLKDRMNFDIPEEIKQLQQFQKEDAALTIYEMLQNIFAIFRQDSSSTGWNETIVENLLANVYHQINHLKTVLEEKLEKEDFTRGKLMSSLHLKRYYGRILHYLKAKEYSHCAWTIVRVEILRNFYFINRLTGYLRN

SEQ ID NO: 1962 - protein, 166 aa, Homo sapiens
  IFN-beta_Q48H
MSYNLLGFLQRSSNFQCQKLLWQLNGRLEYCLKDRMNFDIPEEIKQLHQFQKEDAALTIYEMLQNIFAIFRQDSSSTGWNETIVENLLANVYHQINHLKTVLEEKLEKEDFTRGKLMSSLHLKRYYGRILHYLKAKEYSHCAWTIVRVEILRNFYFINRLTGYLRN

SEQ ID NO: 1963 - protein, 166 aa, Homo sapiens
  IFN-beta_Q48S
MSYNLLGFLQRSSNFQCQKLLWQLNGRLEYCLKDRMNFDIPEEIKQLSQFQKEDAALTIYEMLQNIFAIFRQDSSSTGWNETIVENLLANVYHQINHLKTVLEEKLEKEDFTRGKLMSSLHLKRYYGRILHYLKAKEYSHCAWTIVRVEILRNFYFINRLTGYLRN

SEQ ID NO: 1964 - protein, 166 aa, Homo sapiens
  IFN-beta_Q48T
MSYNLLGFLQRSSNFQCQKLLWQLNGRLEYCLKDRMNFDIPEEIKQLTQFQKEDAALTIYEMLQNIFAIFRQDSSSTGWNETIVENLLANVYHQINHLKTVLEEKLEKEDFTRGKLMSSLHLKRYYGRILHYLKAKEYSHCAWTIVRVEILRNFYFINRLTGYLRN

SEQ ID NO: 1965 - protein, 166 aa, Homo sapiens
  IFN-beta_Q48N
MSYNLLGFLQRSSNFQCQKLLWQLNGRLEYCLKDRMNFDIPEEIKQLNQFQKEDAALTIYEMLQNIFAIFRQDSSSTGWNETIVENLLANVYHQINHLKTVLEEKLEKEDFTRGKLMSSLHLKRYYGRILHYLKAKEYSHCAWTIVRVEILRNFYFINRLTGYLRN

SEQ ID NO: 1966 - protein, 166 aa, Homo sapiens
  IFN-beta_Q49H
MSYNLLGFLQRSSNFQCQKLLWQLNGRLEYCLKDRMNFDIPEEIKQLQHFQKEDAALTIYEMLQNIFAIFRQDSSSTGWNETIVENLLANVYHQINHLKTVLEEKLEKEDFTRGKLMSSLHLKRYYGRILHYLKAKEYSHCAWTIVRVEILRNFYFINRLTGYLRN

SEQ ID NO: 1967 - protein, 166 aa, Homo sapiens
  IFN-beta_Q49S
MSYNLLGFLQRSSNFQCQKLLWQLNGRLEYCLKDRMNFDIPEEIKQLQSFQKEDAALTIYEMLQNIFAIFRQDSSSTGWNETIVENLLANVYHQINHLKTVLEEKLEKEDFTRGKLMSSLHLKRYYGRILHYLKAKEYSHCAWTIVRVEILRNFYFINRLTGYLRN

SEQ ID NO: 1968 - protein, 166 aa, Homo sapiens
  IFN-beta_Q49T
MSYNLLGFLQRSSNFQCQKLLWQLNGRLEYCLKDRMNFDIPEEIKQLQTFQKEDAALTIYEMLQNIFAIFRQDSSSTGWNETIVENLLANVYHQINHLKTVLEEKLEKEDFTRGKLMSSLHLKRYYGRILHYLKAKEYSHCAWTIVRVEILRNFYFINRLTGYLRN

SEQ ID NO: 1969 - protein, 166 aa, Homo sapiens
  IFN-beta_Q49N
MSYNLLGFLQRSSNFQCQKLLWQLNGRLEYCLKDRMNFDIPEEIKQLQNFQKEDAALTIYEMLQNIFAIFRQDSSSTGWNETIVENLLANVYHQINHLKTVLEEKLEKEDFTRGKLMSSLHLKRYYGRILHYLKAKEYSHCAWTIVRVEILRNFYFINRLTGYLRN

SEQ ID NO: 1970 - protein, 166 aa, Homo sapiens
  IFN-beta_Q51H
MSYNLLGFLQRSSNFQCQKLLWQLNGRLEYCLKDRMNFDIPEEIKQLQQFHKEDAALTIYEMLQNIFAIFRQDSSSTGWNETIVENLLANVYHQINHLKTVLEEKLEKEDFTRGKLMSSLHLKRYYGRILHYLKAKEYSHCAWTIVRVEILRNFYFINRLTGYLRN

SEQ ID NO: 1971 - protein, 166 aa, Homo sapiens
  IFN-beta_Q51S
MSYNLLGFLQRSSNFQCQKLLWQLNGRLEYCLKDRMNFDIPEEIKQLQQFSKEDAALTIYEMLQNIFAIFRQDSSSTGWNETIVENLLANVYHQINHLKTVLEEKLEKEDFTRGKLMSSLHLKRYYGRILHYLKAKEYSHCAWTIVRVEILRNFYFINRLTGYLRN

SEQ ID NO: 1972 - protein, 166 aa, Homo sapiens
  IFN-beta_Q51T
MSYNLLGFLQRSSNFQCQKLLWQLNGRLEYCLKDRMNFDIPEEIKQLQQFTKEDAALTIYEMLQNIFAIFRQDSSSTGWNETIVENLLANVYHQINHLKTVLEEKLEKEDFTRGKLMSSLHLKRYYGRILHYLKAKEYSHCAWTIVRVEILRNFYFINRLTGYLRN

SEQ ID NO: 1973 - protein, 166 aa, Homo sapiens
  IFN-beta_Q51N
MSYNLLGFLQRSSNFQCQKLLWQLNGRLEYCLKDRMNFDIPEEIKQLQQFNKEDAALTIYEMLQNIFAIFRQDSSSTGWNETIVENLLANVYHQINHLKTVLEEKLEKEDFTRGKLMSSLHLKRYYGRILHYLKAKEYSHCAWTIVRVEILRNFYFINRLTGYLRN

SEQ ID NO: 1974 - protein, 166 aa, Homo sapiens
  IFN-beta_Q64H
MSYNLLGFLQRSSNFQCQKLLWQLNGRLEYCLKDRMNFDIPEEIKQLQQFQKEDAALTIYEMLHNIFAIFRQDSSSTGWNETIVENLLANVYHQINHLKTVLEEKLEKEDFTRGKLMSSLHLKRYYGRILHYLKAKEYSHCAWTIVRVEILRNFYFINRLTGYLRN

SEQ ID NO: 1975 - protein, 166 aa, Homo sapiens
  IFN-beta_Q64S
MSYNLLGFLQRSSNFQCQKLLWQLNGRLEYCLKDRMNFDIPEEIKQLQQFQKEDAALTIYEMLSNIFAIFRQDSSSTGWNETIVENLLANVYHQINHLKTVLEEKLEKEDFTRGKLMSSLHLKRYYGRILHYLKAKEYSHCAWTIVRVEILRNFYFINRLTGYLRN

SEQ ID NO: 1976 - protein, 166 aa, Homo sapiens
  IFN-beta_Q64T
MSYNLLGFLQRSSNFQCQKLLWQLNGRLEYCLKDRMNFDIPEEIKQLQQFQKEDAALTIYEMLTNIFAIFRQDSSSTGWNETIVENLLANVYHQINHLKTVLEEKLEKEDFTRGKLMSSLHLKRYYGRILHYLKAKEYSHCAWTIVRVEILRNFYFINRLTGYLRN

SEQ ID NO: 1977 - protein, 166 aa, Homo sapiens
  IFN-beta_Q64N
MSYNLLGFLQRSSNFQCQKLLWQLNGRLEYCLKDRMNFDIPEEIKQLQQFQKEDAALTIYEMLNNIFAIFRQDSSSTGWNETIVENLLANVYHQINHLKTVLEEKLEKEDFTRGKLMSSLHLKRYYGRILHYLKAKEYSHCAWTIVRVEILRNFYFINRLTGYLRN

SEQ ID NO: 1978 - protein, 166 aa, Homo sapiens
  IFN-beta_Q72H
MSYNLLGFLQRSSNFQCQKLLWQLNGRLEYCLKDRMNFDIPEEIKQLQQFQKEDAALTIYEMLQNIFAIFRHDSSSTGWNETIVENLLANVYHQINHLKTVLEEKLEKEDFTRGKLMSSLHLKRYYGRILHYLKAKEYSHCAWTIVRVEILRNFYFINRLTGYLRN

SEQ ID NO: 1979 - protein, 166 aa, Homo sapiens
  IFN-beta_Q72S
MSYNLLGFLQRSSNFQCQKLLWQLNGRLEYCLKDRMNFDIPEEIKQLQQFQKEDAALTIYEMLQNIFAIFRSDSSSTGWNETIVENLLANVYHQINHLKTVLEEKLEKEDFTRGKLMSSLHLKRYYGRILHYLKAKEYSHCAWTIVRVEILRNFYFINRLTGYLRN

SEQ ID NO: 1980 - protein, 166 aa, Homo sapiens
  IFN-beta_Q72T
MSYNLLGFLQRSSNFQCQKLLWQLNGRLEYCLKDRMNFDIPEEIKQLQQFQKEDAALTIYEMLQNIFAIFRTDSSSTGWNETIVENLLANVYHQINHLKTVLEEKLEKEDFTRGKLMSSLHLKRYYGRILHYLKAKEYSHCAWTIVRVEILRNFYFINRLTGYLRN

SEQ ID NO: 1981 - protein, 166 aa, Homo sapiens
  IFN-beta_Q72N
MSYNLLGFLQRSSNFQCQKLLWQLNGRLEYCLKDRMNFDIPEEIKQLQQFQKEDAALTIYEMLQNIFAIFRNDSSSTGWNETIVENLLANVYHQINHLKTVLEEKLEKEDFTRGKLMSSLHLKRYYGRILHYLKAKEYSHCAWTIVRVEILRNFYFINRLTGYLRN

SEQ ID NO: 1982 - protein, 166 aa, Homo sapiens; identical to SEQ ID NO: 147
  IFN-beta_WT

SEQ ID NO: 1983 - protein, 165 aa, Homo sapiens
  IFN-alpha-2b_P4A
CDLAQTHSLGSRRTLMLLAQMRRISLFSCLKDRHDFGFPQEEFGNQFQKAETIPVLHEMIQQIFNLFSTKDSSAAWDETLLDKFYTELYQQLNDLEACVIQGVGVTETPLMKEDSILAVRKYFQRITLYLKEKKYSPCAWEVVRAEIMRSFSLSTNLQESLRSKE

SEQ ID NO: 1984 - protein, 165 aa, Homo sapiens
  IFN-alpha-2b_L3V
CDVPQTHSLGSRRTLMLLAQMRRISLFSCLKDRHDFGFPQEEFGNQFQKAETIPVLHEMIQQIFNLFSTKDSSAAWDETLLDKFYTELYQQLNDLEACVIQGVGVTETPLMKEDSILAVRKYFQRITLYLKEKKYSPCAWEVVRAEIMRSFSLSTNLQESLRSKE

SEQ ID NO: 1985 - protein, 165 aa, Homo sapiens
  IFN-alpha-2b_R12H
CDLPQTHSLGSHRTLMLLAQMRRISLFSCLKDRHDFGFPQEEFGNQFQKAETIPVLHEMIQQIFNLFSTKDSSAAWDETLLDKFYTELYQQLNDLEACVIQGVGVTETPLMKEDSILAVRKYFQRITLYLKEKKYSPCAWEVVRAEIMRSFSLSTNLQESLRSKE

SEQ ID NO: 1986 - protein, 165 aa, Homo sapiens
  IFN-alpha-2b_R13H
CDLPQTHSLGSRHTLMLLAQMRRISLFSCLKDRHDFGFPQEEFGNQFQKAETIPVLHEMIQQIFNLFSTKDSSAAWDETLLDKFYTELYQQLNDLEACVIQGVGVTETPLMKEDSILAVRKYFQRITLYLKEKKYSPCAWEVVRAEIMRSFSLSTNLQESLRSKE

SEQ ID NO: 1987 - protein, 165 aa, Homo sapiens
  IFN-alpha-2b_M16V
CDLPQTHSLGSRRTLVLLAQMRRISLFSCLKDRHDFGFPQEEFGNQFQKAETIPVLHEMIQQIFNLFSTKDSSAAWDETLLDKFYTELYQQLNDLEACVIQGVGVTETPLMKEDSILAVRKYFQRITLYLKEKKYSPCAWEVVRAEIMRSFSLSTNLQESLRSKE

SEQ ID NO: 1988 - protein, 165 aa, Homo sapiens
  IFN-alpha-2b_M16I
CDLPQTHSLGSRRTLILLAQMRRISLFSCLKDRHDFGFPQEEFGNQFQKAETIPVLHEMIQQIFNLFSTKDSSAAWDETLLDKFYTELYQQLNDLEACVIQGVGVTETPLMKEDSILAVRKYFQRITLYLKEKKYSPCAWEVVRAEIMRSFSLSTNLQESLRSKE

SEQ ID NO: 1989 - protein, 165 aa, Homo sapiens
  IFN-alpha-2b_R22H
CDLPQTHSLGSRRTLMLLAQMHRISLFSCLKDRHDFGFPQEEFGNQFQKAETIPVLHEMIQQIFNLFSTKDSSAAWDETLLDKFYTELYQQLNDLEACVIQGVGVTETPLMKEDSILAVRKYFQRITLYLKEKKYSPCAWEVVRAEIMRSFSLSTNLQESLRSKE

SEQ ID NO: 1990 - protein, 165 aa, Homo sapiens
  IFN-alpha-2b_F27I
CDLPQTHSLGSRRTLMLLAQMRRISLISCLKDRHDFGFPQEEFGNQFQKAETIPVLHEMIQQIFNLFSTKDSSAAWDETLLDKFYTELYQQLNDLEACVIQGVGVTETPLMKEDSILAVRKYFQRITLYLKEKKYSPCAWEVVRAEIMRSFSLSTNLQESLRSKE

SEQ ID NO: 1991 - protein, 165 aa, Homo sapiens
  IFN-alpha-2b_F27V
CDLPQTHSLGSRRTLMLLAQMRRISLVSCLKDRHDFGFPQEEFGNQFQKAETIPVLHEMIQQIFNLFSTKDSSAAWDETLLDKFYTELYQQLNDLEACVIQGVGVTETPLMKEDSILAVRKYFQRITLYLKEKKYSPCAWEVVRAEIMRSFSLSTNLQESLRSKE

SEQ ID NO: 1992 - protein, 165 aa, Homo sapiens
  IFN-alpha-2b_L30I
CDLPQTHSLGSRRTLMLLAQMRRISLFSCIKDRHDFGFPQEEFGNQFQKAETIPVLHEMIQQIFNLFSTKDSSAAWDETLLDKFYTELYQQLNDLEACVIQGVGVTETPLMKEDSILAVRKYFQRITLYLKEKKYSPCAWEVVRAEIMRSFSLSTNLQESLRSKE

SEQ ID NO: 1993 - protein, 165 aa, Homo sapiens
  IFN-alpha-2b_K31Q
CDLPQTHSLGSRRTLMLLAQMRRISLFSCLQDRHDFGFPQEEFGNQFQKAETIPVLHEMIQQIFNLFSTKDSSAAWDETLLDKFYTELYQQLNDLEACVIQGVGVTETPLMKEDSILAVRKYFQRITLYLKEKKYSPCAWEVVRAEIMRSFSLSTNLQESLRSKE

SEQ ID NO: 1994 - protein, 165 aa, Homo sapiens
  IFN-alpha-2b_R33H
CDLPQTHSLGSRRTLMLLAQMRRISLFSCLKDHHDFGFPQEEFGNQFQKAETIPVLHEMIQQIFNLFSTKDSSAAWDETLLDKFYTELYQQLNDLEACVIQGVGVTETPLMKEDSILAVRKYFQRITLYLKEKKYSPCAWEVVRAEIMRSFSLSTNLQESLRSKE

SEQ ID NO: 1995 - protein, 165 aa, Homo sapiens
  IFN-alpha-2b_E41Q
CDLPQTHSLGSRRTLMLLAQMRRISLFSCLKDRHDFGFPQQEFGNQFQKAETIPVLHEMIQQIFNLFSTKDSSAAWDETLLDKFYTELYQQLNDLEACVIQGVGVTETPLMKEDSILAVRKYFQRITLYLKEKKYSPCAWEVVRAEIMRSFSLSTNLQESLRSKE

SEQ ID NO: 1996 - protein, 165 aa, Homo sapiens
  IFN-alpha-2b_E41H
CDLPQTHSLGSRRTLMLLAQMRRISLFSCLKDRHDFGFPQHEFGNQFQKAETIPVLHEMIQQIFNLFSTKDSSAAWDETLLDKFYTELYQQLNDLEACVIQGVGVTETPLMKEDSILAVRKYFQRITLYLKEKKYSPCAWEVVRAEIMRSFSLSTNLQESLRSKE

SEQ ID NO: 1997 - protein, 165 aa, Homo sapiens
  IFN-alpha-2b_E58Q
CDLPQTHSLGSRRTLMLLAQMRRISLFSCLKDRHDFGFPQEEFGNQFQKAETIPVLHQMIQQIFNLFSTKDSSAAWDETLLDKFYTELYQQLNDLEACVIQGVGVTETPLMKEDSILAVRKYFQRITLYLKEKKYSPCAWEVVRAEIMRSFSLSTNLQESLRSKE

SEQ ID NO: 1998 - protein, 165 aa, Homo sapiens
  IFN-alpha-2b_E58H
CDLPQTHSLGSRRTLMLLAQMRRISLFSCLKDRHDFGFPQEEFGNQFQKAETIPVLHHMIQQIFNLFSTKDSSAAWDETLLDKFYTELYQQLNDLEACVIQGVGVTETPLMKEDSILAVRKYFQRITLYLKEKKYSPCAWEVVRAEIMRSFSLSTNLQESLRSKE

SEQ ID NO: 1999 - protein, 165 aa, Homo sapiens
  IFN-alpha-2b_K70T
CDLPQTHSLGSRRTLMLLAQMRRISLFSCLKDRHDFGFPQEEFGNQFQKAETIPVLHEMIQQIFNLFSTTDSSAAWDETLLDKFYTELYQQLNDLEACVIQGVGVTETPLMKEDSILAVRKYFQRITLYLKEKKYSPCAWEVVRAEIMRSFSLSTNLQESLRSKE

SEQ ID NO: 2000 - protein, 165 aa, Homo sapiens
  IFN-alpha-2b_E78Q
CDLPQTHSLGSRRTLMLLAQMRRISLFSCLKDRHDFGFPQEEFGNQFQKAETIPVLHEMIQQIFNLFSTKDSSAAWDQTLLDKFYTELYQQLNDLEACVIQGVGVTETPLMKEDSILAVRKYFQRITLYLKEKKYSPCAWEVVRAEIMRSFSLSTNLQESLRSKE

SEQ ID NO: 2001 - protein, 165 aa, Homo sapiens
  IFN-alpha-2b_E78H
CDLPQTHSLGSRRTLMLLAQMRRISLFSCLKDRHDFGFPQEEFGNQFQKAETIPVLHEMIQQIFNLFSTKDSSAAWDHTLLDKFYTELYQQLNDLEACVIQGVGVTETPLMKEDSILAVRKYFQRITLYLKEKKYSPCAWEVVRAEIMRSFSLSTNLQESLRSKE

SEQ ID NO: 2002 - protein, 165 aa, Homo sapiens
  IFN-alpha-2b_Y89I
CDLPQTHSLGSRRTLMLLAQMRRISLFSCLKDRHDFGFPQEEFGNQFQKAETIPVLHEMIQQIFNLFSTKDSSAAWDETLLDKFYTELIQQLNDLEACVIQGVGVTETPLMKEDSILAVRKYFQRITLYLKEKKYSPCAWEVVRAEIMRSFSLSTNLQESLRSKE

SEQ ID NO: 2003 - protein, 165 aa, Homo sapiens
  IFN-alpha-2b_E107Q
CDLPQTHSLGSRRTLMLLAQMRRISLFSCLKDRHDFGFPQEEFGNQFQKAETIPVLHEMIQQIFNLFSTKDSSAAWDETLLDKFYTELYQQLNDLEACVIQGVGVTQTPLMKEDSILAVRKYFQRITLYLKEKKYSPCAWEVVRAEIMRSFSLSTNLQESLRSKE

SEQ ID NO: 2004 - protein, 165 aa, Homo sapiens
  IFN-alpha-2b_E107H
CDLPQTHSLGSRRTLMLLAQMRRISLFSCLKDRHDFGFPQEEFGNQFQKAETIPVLHEMIQQIFNLFSTKDSSAAWDETLLDKFYTELYQQLNDLEACVIQGVGVTHTPLMKEDSILAVRKYFQRITLYLKEKKYSPCAWEVVRAEIMRSFSLSTNLQESLRSKE

SEQ ID NO: 2005 - protein, 165 aa, Homo sapiens
  IFN-alpha-2b_P109A
CDLPQTHSLGSRRTLMLLAQMRRISLFSCLKDRHDFGFPQEEFGNQFQKAETIPVLHEMIQQIFNLFSTKDSSAAWDETLLDKFYTELYQQLNDLEACVIQGVGVTETALMKEDSILAVRKYFQRITLYLKEKKYSPCAWEVVRAEIMRSFSLSTNLQESLRSKE

SEQ ID NO: 2006 - protein, 165 aa, Homo sapiens
  IFN-alpha-2b_L110V
CDLPQTHSLGSRRTLMLLAQMRRISLFSCLKDRHDFGFPQEEFGNQFQKAETIPVLHEMIQQIFNLFSTKDSSAAWDETLLDKFYTELYQQLNDLEACVIQGVGVTETPVMKEDSILAVRKYFQRITLYLKEKKYSPCAWEVVRAEIMRSFSLSTNLQESLRSKE

SEQ ID NO: 2007 - protein, 165 aa, Homo sapiens
  IFN-alpha-2b_M111I
CDLPQTHSLGSRRTLMLLAQMRRISLFSCLKDRHDFGFPQEEFGNQFQKAETIPVLHEMIQQIFNLFSTKDSSAAWDETLLDKFYTELYQQLNDLEACVIQGVGVTETPLIKEDSILAVRKYFQRITLYLKEKKYSPCAWEVVRAEIMRSFSLSTNLQESLRSKE

SEQ ID NO: 2008 - protein, 165 aa, Homo sapiens
  IFN-alpha-2b_E113Q
CDLPQTHSLGSRRTLMLLAQMRRISLFSCLKDRHDFGFPQEEFGNQFQKAETIPVLHEMIQQIFNLFSTKDSSAAWDETLLDKFYTELYQQLNDLEACVIQGVGVTETPLMKQDSILAVRKYFQRITLYLKEKKYSPCAWEVVRAEIMRSFSLSTNLQESLRSKE

SEQ ID NO: 2009 - protein, 165 aa, Homo sapiens
  IFN-alpha-2b_E113H
CDLPQTHSLGSRRTLMLLAQMRRISLFSCLKDRHDFGFPQEEFGNQFQKAETIPVLHEMIQQIFNLFSTKDSSAAWDETLLDKFYTELYQQLNDLEACVIQGVGVTETPLMKHDSILAVRKYFQRITLYLKEKKYSPCAWEVVRAEIMRSFSLSTNLQESLRSKE

SEQ ID NO: 2010 - protein, 165 aa, Homo sapiens
  IFN-alpha-2b_L117V
CDLPQTHSLGSRRTLMLLAQMRRISLFSCLKDRHDFGFPQEEFGNQFQKAETIPVLHEMIQQIFNLFSTKDSSAAWDETLLDKFYTELYQQLNDLEACVIQGVGVTETPLMKEDSIVAVRKYFQRITLYLKEKKYSPCAWEVVRAEIMRSFSLSTNLQESLRSKE

SEQ ID NO: 2011 - protein, 165 aa, Homo sapiens
  IFN-alpha-2b_L117I
CDLPQTHSLGSRRTLMLLAQMRRISLFSCLKDRHDFGFPQEEFGNQFQKAETIPVLHEMIQQIFNLFSTKDSSAAWDETLLDKFYTELYQQLNDLEACVIQGVGVTETPLMKEDSIIAVRKYFQRITLYLKEKKYSPCAWEVVRAEIMRSFSLSTNLQESLRSKE

SEQ ID NO: 2012 - protein, 165 aa, Homo sapiens
  IFN-alpha-2b_K121Q
CDLPQTHSLGSRRTLMLLAQMRRISLFSCLKDRHDFGFPQEEFGNQFQKAETIPVLHEMIQQIFNLFSTKDSSAAWDETLLDKFYTELYQQLNDLEACVIQGVGVTETPLMKEDSILAVRQYFQRITLYLKEKKYSPCAWEVVRAEIMRSFSLSTNLQESLRSKE

SEQ ID NO: 2013 - protein, 165 aa, Homo sapiens
  IFN-alpha-2b_K121T
CDLPQTHSLGSRRTLMLLAQMRRISLFSCLKDRHDFGFPQEEFGNQFQKAETIPVLHEMIQQIFNLFSTKDSSAAWDETLLDKFYTELYQQLNDLEACVIQGVGVTETPLMKEDSILAVRTYFQRITLYLKEKKYSPCAWEVVRAEIMRSFSLSTNLQESLRSKE

SEQ ID NO: 2014 - protein, 165 aa, Homo sapiens
  IFN-alpha-2b_R125H
CDLPQTHSLGSRRTLMLLAQMRRISLFSCLKDRHDFGFPQEEFGNQFQKAETIPVLHEMIQQIFNLFSTKDSSAAWDETLLDKFYTELYQQLNDLEACVIQGVGVTETPLMKEDSILAVRKYFQHITLYLKEKKYSPCAWEVVRAEIMRSFSLSTNLQESLRSKE

SEQ ID NO: 2015 - protein, 165 aa, Homo sapiens
  IFN-alpha-2b_R125Q
CDLPQTHSLGSRRTLMLLAQMRRISLFSCLKDRHDFGFPQEEFGNQFQKAETIPVLHEMIQQIFNLFSTKDSSAAWDETLLDKFYTELYQQLNDLEACVIQGVGVTETPLMKEDSILAVRKYFQQITLYLKEKKYSPCAWEVVRAEIMRSFSLSTNLQESLRSKE

SEQ ID NO: 2016 - protein, 165 aa, Homo sapiens
  IFN-alpha-2b_L128V
CDLPQTHSLGSRRTLMLLAQMRRISLFSCLKDRHDFGFPQEEFGNQFQKAETIPVLHEMIQQIFNLFSTKDSSAAWDETLLDKFYTELYQQLNDLEACVIQGVGVTETPLMKEDSILAVRKYFQRITVYLKEKKYSPCAWEVVRAEIMRSFSLSTNLQESLRSKE

SEQ ID NO: 2017 - protein, 165 aa, Homo sapiens
  IFN-alpha-2b_L128I
CDLPQTHSLGSRRTLMLLAQMRRISLFSCLKDRHDFGFPQEEFGNQFQKAETIPVLHEMIQQIFNLFSTKDSSAAWDETLLDKFYTELYQQLNDLEACVIQGVGVTETPLMKEDSILAVRKYFQRITIYLKEKKYSPCAWEVVRAEIMRSFSLSTNLQESLRSKE

SEQ ID NO: 2018 - protein, 165 aa, Homo sapiens
  IFN-alpha-2b_K131Q
CDLPQTHSLGSRRTLMLLAQMRRISLFSCLKDRHDFGFPQEEFGNQFQKAETIPVLHEMIQQIFNLFSTKDSSAAWDETLLDKFYTELYQQLNDLEACVIQGVGVTETPLMKEDSILAVRKYFQRITLYLQEKKYSPCAWEVVRAEIMRSFSLSTNLQESLRSKE

SEQ ID NO: 2019 - protein, 165 aa, Homo sapiens
  IFN-alpha-2b_K131T
CDLPQTHSLGSRRTLMLLAQMRRISLFSCLKDRHDFGFPQEEFGNQFQKAETIPVLHEMIQQIFNLFSTKDSSAAWDETLLDKFYTELYQQLNDLEACVIQGVGVTETPLMKEDSILAVRKYFQRITLYLTEKKYSPCAWEVVRAEIMRSFSLSTNLQESLRSKE

SEQ ID NO: 2020 - protein, 165 aa, Homo sapiens
  IFN-alpha-2b_E132Q
CDLPQTHSLGSRRTLMLLAQMRRISLFSCLKDRHDFGFPQEEFGNQFQKAETIPVLHEMIQQIFNLFSTKDSSAAWDETLLDKFYTELYQQLNDLEACVIQGVGVTETPLMKEDSILAVRKYFQRITLYLKQKKYSPCAWEVVRAEIMRSFSLSTNLQESLRSKE

SEQ ID NO: 2021 - protein, 165 aa, Homo sapiens
  IFN-alpha-2b_E132H
CDLPQTHSLGSRRTLMLLAQMRRISLFSCLKDRHDFGFPQEEFGNQFQKAETIPVLHEMIQQIFNLFSTKDSSAAWDETLLDKFYTELYQQLNDLEACVIQGVGVTETPLMKEDSILAVRKYFQRITLYLKHKKYSPCAWEVVRAEIMRSFSLSTNLQESLRSKE

SEQ ID NO: 2022 - protein, 165 aa, Homo sapiens
  IFN-alpha-2b_K133Q
CDLPQTHSLGSRRTLMLLAQMRRISLFSCLKDRHDFGFPQEEFGNQFQKAETIPVLHEMIQQIFNLFSTKDSSAAWDETLLDKFYTELYQQLNDLEACVIQGVGVTETPLMKEDSILAVRKYFQRITLYLKEQKYSPCAWEVVRAEIMRSFSLSTNLQESLRSKE

SEQ ID NO: 2023 - protein, 165 aa, Homo sapiens
  IFN-alpha-2b_K133T
CDLPQTHSLGSRRTLMLLAQMRRISLFSCLKDRHDFGFPQEEFGNQFQKAETIPVLHEMIQQIFNLFSTKDSSAAWDETLLDKFYTELYQQLNDLEACVIQGVGVTETPLMKEDSILAVRKYFQRITLYLKETKYSPCAWEVVRAEIMRSFSLSTNLQESLRSKE

SEQ ID NO: 2024 - protein, 165 aa, Homo sapiens
  IFN-alpha-2b_K134Q
CDLPQTHSLGSRRTLMLLAQMRRISLFSCLKDRHDFGFPQEEFGNQFQKAETIPVLHEMIQQIFNLFSTKDSSAAWDETLLDKFYTELYQQLNDLEACVIQGVGVTETPLMKEDSILAVRKYFQRITLYLKEKQYSPCAWEVVRAEIMRSFSLSTNLQESLRSKE

SEQ ID NO: 2025 - protein, 165 aa, Homo sapiens
  IFN-alpha-2b_Y135H
CDLPQTHSLGSRRTLMLLAQMRRISLFSCLKDRHDFGFPQEEFGNQFQKAETIPVLHEMIQQIFNLFSTKDSSAAWDETLLDKFYTELYQQLNDLEACVIQGVGVTETPLMKEDSILAVRKYFQRITLYLKEKKHSPCAWEVVRAEIMRSFSLSTNLQESLRSKE

SEQ ID NO: 2026 - protein, 165 aa, Homo sapiens
  IFN-alpha-2b_Y135I
CDLPQTHSLGSRRTLMLLAQMRRISLFSCLKDRHDFGFPQEEFGNQFQKAETIPVLHEMIQQIFNLFSTKDSSAAWDETLLDKFYTELYQQLNDLEACVIQGVGVTETPLMKEDSILAVRKYFQRITLYLKEKKISPCAWEVVRAEIMRSFSLSTNLQESLRSKE

SEQ ID NO: 2027 - protein, 165 aa, Homo sapiens
  IFN-alpha-2b_P137A
CDLPQTHSLGSRRTLMLLAQMRRISLFSCLKDRHDFGFPQEEFGNQFQKAETIPVLHEMIQQIFNLFSTKDSSAAWDETLLDKFYTELYQQLNDLEACVIQGVGVTETPLMKEDSILAVRKYFQRITLYLKEKKYSACAWEVVRAEIMRSFSLSTNLQESLRSKE

SEQ ID NO: 2028 - protein, 165 aa, Homo sapiens
  IFN-alpha-2b_M148V
CDLPQTHSLGSRRTLMLLAQMRRISLFSCLKDRHDFGFPQEEFGNQFQKAETIPVLHEMIQQIFNLFSTKDSSAAWDETLLDKFYTELYQQLNDLEACVIQGVGVTETPLMKEDSILAVRKYFQRITLYLKEKKYSPCAWEVVRAEIVRSFSLSTNLQESLRSKE

SEQ ID NO: 2029 - protein, 165 aa, Homo sapiens
  IFN-alpha-2b_M148I
CDLPQTHSLGSRRTLMLLAQMRRISLFSCLKDRHDFGFPQEEFGNQFQKAETIPVLHEMIQQIFNLFSTKDSSAAWDETLLDKFYTELYQQLNDLEACVIQGVGVTETPLMKEDSILAVRKYFQRITLYLKEKKYSPCAWEVVRAEIIRSFSLSTNLQESLRSKE

SEQ ID NO: 2030 - protein, 165 aa, Homo sapiens
  IFN-alpha-2b_R149H
CDLPQTHSLGSRRTLMLLAQMRRISLFSCLKDRHDFGFPQEEFGNQFQKAETIPVLHEMIQQIFNLFSTKDSSAAWDETLLDKFYTELYQQLNDLEACVIQGVGVTETPLMKEDSILAVRKYFQRITLYLKEKKYSPCAWEVVRAEIMHSFSLSTNLQESLRSKE

SEQ ID NO: 2031 - protein, 165 aa, Homo sapiens
  IFN-alpha-2b_R149Q
CDLPQTHSLGSRRTLMLLAQMRRISLFSCLKDRHDFGFPQEEFGNQFQKAETIPVLHEMIQQIFNLFSTKDSSAAWDETLLDKFYTELYQQLNDLEACVIQGVGVTETPLMKEDSILAVRKYFQRITLYLKEKKYSPCAWEVVRAEIMQSFSLSTNLQESLRSKE

SEQ ID NO: 2032 - protein, 165 aa, Homo sapiens
  IFN-alpha-2b_E159Q
CDLPQTHSLGSRRTLMLLAQMRRISLFSCLKDRHDFGFPQEEFGNQFQKAETIPVLHEMIQQIFNLFSTKDSSAAWDETLLDKFYTELYQQLNDLEACVIQGVGVTETPLMKEDSILAVRKYFQRITLYLKEKKYSPCAWEVVRAEIMRSFSLSTNLQQSLRSKE

SEQ ID NO: 2033 - protein, 165 aa, Homo sapiens
  IFN-alpha-2b_E159H
CDLPQTHSLGSRRTLMLLAQMRRISLFSCLKDRHDFGFPQEEFGNQFQKAETIPVLHEMIQQIFNLFSTKDSSAAWDETLLDKFYTELYQQLNDLEACVIQGVGVTETPLMKEDSILAVRKYFQRITLYLKEKKYSPCAWEVVRAEIMRSFSLSTNLQHSLRSKE

SEQ ID NO: 2034 - protein, 165 aa, Homo sapiens
  IFN-alpha-2b_P4S
CDLSQTHSLGSRRTLMLLAQMRRISLFSCLKDRHDFGFPQEEFGNQFQKAETIPVLHEMIQQIFNLFSTKDSSAAWDETLLDKFYTELYQQLNDLEACVIQGVGVTETPLMKEDSILAVRKYFQRITLYLKEKKYSPCAWEVVRAEIMRSFSLSTNLQESLRSKE

SEQ ID NO: 2035 - protein, 165 aa, Homo sapiens
  IFN-alpha-2b_M111V
CDLPQTHSLGSRRTLMLLAQMRRISLFSCLKDRHDFGFPQEEFGNQFQKAETIPVLHEMIQQIFNLFSTKDSSAAWDETLLDKFYTELYQQLNDLEACVIQGVGVTETPLVKEDSILAVRKYFQRITLYLKEKKYSPCAWEVVRAEIMRSFSLSTNLQESLRSKE

SEQ ID NO: 2036 - protein, 165 aa, Homo sapiens
  IFN-alpha-2b_Y89H
CDLPQTHSLGSRRTLMLLAQMRRISLFSCLKDRHDFGFPQEEFGNQFQKAETIPVLHEMIQQIFNLFSTKDSSAAWDETLLDKFYTELHQQLNDLEACVIQGVGVTETPLMKEDSILAVRKYFQRITLYLKEKKYSPCAWEVVRAEIMRSFSLSTNLQESLRSKE

SEQ ID NO: 2037 - protein, 165 aa, Homo sapiens
  IFN-alpha-2b_L3I
CDIPQTHSLGSRRTLMLLAQMRRISLFSCLKDRHDFGFPQEEFGNQFQKAETIPVLHEMIQQIFNLFSTKDSSAAWDETLLDKFYTELYQQLNDLEACVIQGVGVTETPLMKEDSILAVRKYFQRITLYLKEKKYSPCAWEVVRAEIMRSFSLSTNLQESLRSKE

SEQ ID NO: 2038 - protein, 165 aa, Homo sapiens
  IFN-alpha-2b_R12Q
CDLPQTHSLGSQRTLMLLAQMRRISLFSCLKDRHDFGFPQEEFGNQFQKAETIPVLHEMIQQIFNLFSTKDSSAAWDETLLDKFYTELYQQLNDLEACVIQGVGVTETPLMKEDSILAVRKYFQRITLYLKEKKYSPCAWEVVRAEIMRSFSLSTNLQESLRSKE

SEQ ID NO: 2039 - protein, 165 aa, Homo sapiens
  IFN-alpha-2b_R13Q
CDLPQTHSLGSRQTLMLLAQMRRISLFSCLKDRHDFGFPQEEFGNQFQKAETIPVLHEMIQQIFNLFSTKDSSAAWDETLLDKFYTELYQQLNDLEACVIQGVGVTETPLMKEDSILAVRKYFQRITLYLKEKKYSPCAWEVVRAEIMRSFSLSTNLQESLRSKE

SEQ ID NO: 2040 - protein, 165 aa, Homo sapiens
  IFN-alpha-2b_R22Q
CDLPQTHSLGSRRTLMLLAQMQRISLFSCLKDRHDFGFPQEEFGNQFQKAETIPVLHEMIQQIFNLFSTKDSSAAWDETLLDKFYTELYQQLNDLEACVIQGVGVTETPLMKEDSILAVRKYFQRITLYLKEKKYSPCAWEVVRAEIMRSFSLSTNLQESLRSKE

SEQ ID NO: 2041 - protein, 165 aa, Homo sapiens
  IFN-alpha-2b_R23H
CDLPQTHSLGSRRTLMLLAQMRHISLFSCLKDRHDFGFPQEEFGNQFQKAETIPVLHEMIQQIFNLFSTKDSSAAWDETLLDKFYTELYQQLNDLEACVIQGVGVTETPLMKEDSILAVRKYFQRITLYLKEKKYSPCAWEVVRAEIMRSFSLSTNLQESLRSKE

SEQ ID NO: 2042 - protein, 165 aa, Homo sapiens
  IFN-alpha-2b_R23Q
CDLPQTHSLGSRRTLMLLAQMRQISLFSCLKDRHDFGFPQEEFGNQFQKAETIPVLHEMIQQIFNLFSTKDSSAAWDETLLDKFYTELYQQLNDLEACVIQGVGVTETPLMKEDSILAVRKYFQRITLYLKEKKYSPCAWEVVRAEIMRSFSLSTNLQESLRSKE

SEQ ID NO: 2043 - protein, 165 aa, Homo sapiens
  IFN-alpha-2b_L30V
CDLPQTHSLGSRRTLMLLAQMRRISLFSCVKDRHDFGFPQEEFGNQFQKAETIPVLHEMIQQIFNLFSTKDSSAAWDETLLDKFYTELYQQLNDLEACVIQGVGVTETPLMKEDSILAVRKYFQRITLYLKEKKYSPCAWEVVRAEIMRSFSLSTNLQESLRSKE

SEQ ID NO: 2044 - protein, 165 aa, Homo sapiens
  IFN-alpha-2b_K31T
CDLPQTHSLGSRRTLMLLAQMRRISLFSCLTDRHDFGFPQEEFGNQFQKAETIPVLHEMIQQIFNLFSTKDSSAAWDETLLDKFYTELYQQLNDLEACVIQGVGVTETPLMKEDSILAVRKYFQRITLYLKEKKYSPCAWEVVRAEIMRSFSLSTNLQESLRSKE

SEQ ID NO: 2045 - protein, 165 aa, Homo sapiens
  IFN-alpha-2b_R33Q
CDLPQTHSLGSRRTLMLLAQMRRISLFSCLKDQHDFGFPQEEFGNQFQKAETIPVLHEMIQQIFNLFSTKDSSAAWDETLLDKFYTELYQQLNDLEACVIQGVGVTETPLMKEDSILAVRKYFQRITLYLKEKKYSPCAWEVVRAEIMRSFSLSTNLQESLRSKE

SEQ ID NO: 2046 - protein, 165 aa, Homo sapiens
  IFN-alpha-2b_K49Q
CDLPQTHSLGSRRTLMLLAQMRRISLFSCLKDRHDFGFPQEEFGNQFQQAETIPVLHEMIQQIFNLFSTKDSSAAWDETLLDKFYTELYQQLNDLEACVIQGVGVTETPLMKEDSILAVRKYFQRITLYLKEKKYSPCAWEVVRAEIMRSFSLSTNLQESLRSKE

SEQ ID NO: 2047 - protein, 165 aa, Homo sapiens
  IFN-alpha-2b_K49T
CDLPQTHSLGSRRTLMLLAQMRRISLFSCLKDRHDFGFPQEEFGNQFQTAETIPVLHEMIQQIFNLFSTKDSSAAWDETLLDKFYTELYQQLNDLEACVIQGVGVTETPLMKEDSILAVRKYFQRITLYLKEKKYSPCAWEVVRAEIMRSFSLSTNLQESLRSKE

SEQ ID NO: 2048 - protein, 165 aa, Homo sapiens
  IFN-alpha-2b_K70Q
CDLPQTHSLGSRRTLMLLAQMRRISLFSCLKDRHDFGFPQEEFGNQFQKAETIPVLHEMIQQIFNLFSTQDSSAAWDETLLDKFYTELYQQLNDLEACVIQGVGVTETPLMKEDSILAVRKYFQRITLYLKEKKYSPCAWEVVRAEIMRSFSLSTNLQESLRSKE

SEQ ID NO: 2049 - protein, 165 aa, Homo sapiens
  IFN-alpha-2b_K83Q
CDLPQTHSLGSRRTLMLLAQMRRISLFSCLKDRHDFGFPQEEFGNQFQKAETIPVLHEMIQQIFNLFSTKDSSAAWDETLLDQFYTELYQQLNDLEACVIQGVGVTETPLMKEDSILAVRKYFQRITLYLKEKKYSPCAWEVVRAEIMRSFSLSTNLQESLRSKE

SEQ ID NO: 2050 - protein, 165 aa, Homo sapiens
  IFN-alpha-2b_K83T
CDLPQTHSLGSRRTLMLLAQMRRISLFSCLKDRHDFGFPQEEFGNQFQKAETIPVLHEMIQQIFNLFSTKDSSAAWDETLLDTFYTELYQQLNDLEACVIQGVGVTETPLMKEDSILAVRKYFQRITLYLKEKKYSPCAWEVVRAEIMRSFSLSTNLQESLRSKE

SEQ ID NO: 2051 - protein, 165 aa, Homo sapiens
  IFN-alpha-2b_E96Q
CDLPQTHSLGSRRTLMLLAQMRRISLFSCLKDRHDFGFPQEEFGNQFQKAETIPVLHEMIQQIFNLFSTKDSSAAWDETLLDKFYTELYQQLNDLQACVIQGVGVTETPLMKEDSILAVRKYFQRITLYLKEKKYSPCAWEVVRAEIMRSFSLSTNLQESLRSKE

SEQ ID NO: 2052 - protein, 165 aa, Homo sapiens
  IFN-alpha-2b_E96H
CDLPQTHSLGSRRTLMLLAQMRRISLFSCLKDRHDFGFPQEEFGNQFQKAETIPVLHEMIQQIFNLFSTKDSSAAWDETLLDKFYTELYQQLNDLHACVIQGVGVTETPLMKEDSILAVRKYFQRITLYLKEKKYSPCAWEVVRAEIMRSFSLSTNLQESLRSKE

SEQ ID NO: 2053 - protein, 165 aa, Homo sapiens
  IFN-alpha-2b_P109S
CDLPQTHSLGSRRTLMLLAQMRRISLFSCLKDRHDFGFPQEEFGNQFQKAETIPVLHEMIQQIFNLFSTKDSSAAWDETLLDKFYTELYQQLNDLEACVIQGVGVTETSLMKEDSILAVRKYFQRITLYLKEKKYSPCAWEVVRAEIMRSFSLSTNLQESLRSKE

SEQ ID NO: 2054 - protein, 165 aa, Homo sapiens
  IFN-alpha-2b_L110I
CDLPQTHSLGSRRTLMLLAQMRRISLFSCLKDRHDFGFPQEEFGNQFQKAETIPVLHEMIQQIFNLFSTKDSSAAWDETLLDKFYTELYQQLNDLEACVIQGVGVTETPIMKEDSILAVRKYFQRITLYLKEKKYSPCAWEVVRAEIMRSFSLSTNLQESLRSKE

SEQ ID NO: 2055 - protein, 165 aa, Homo sapiens
  IFN-alpha-2b_R120H
CDLPQTHSLGSRRTLMLLAQMRRISLFSCLKDRHDFGFPQEEFGNQFQKAETIPVLHEMIQQIFNLFSTKDSSAAWDETLLDKFYTELYQQLNDLEACVIQGVGVTETPLMKEDSILAVHKYFQRITLYLKEKKYSPCAWEVVRAEIMRSFSLSTNLQESLRSKE

SEQ ID NO: 2056 - protein, 165 aa, Homo sapiens
  IFN-alpha-2b_R120Q
CDLPQTHSLGSRRTLMLLAQMRRISLFSCLKDRHDFGFPQEEFGNQFQKAETIPVLHEMIQQIFNLFSTKDSSAAWDETLLDKFYTELYQQLNDLEACVIQGVGVTETPLMKEDSILAVQKYFQRITLYLKEKKYSPCAWEVVRAEIMRSFSLSTNLQESLRSKE

SEQ ID NO: 2057 - protein, 165 aa, Homo sapiens
  IFN-alpha-2b_K134T
CDLPQTHSLGSRRTLMLLAQMRRISLFSCLKDRHDFGFPQEEFGNQFQKAETIPVLHEMIQQIFNLFSTKDSSAAWDETLLDKFYTELYQQLNDLEACVIQGVGVTETPLMKEDSILAVRKYFQRITLYLKEKTYSPCAWEVVRAEIMRSFSLSTNLQESLRSKE

SEQ ID NO: 2058 - protein, 165 aa, Homo sapiens
  IFN-alpha-2b_P137S
CDLPQTHSLGSRRTLMLLAQMRRISLFSCLKDRHDFGFPQEEFGNQFQKAETIPVLHEMIQQIFNLFSTKDSSAAWDETLLDKFYTELYQQLNDLEACVIQGVGVTETPLMKEDSILAVRKYFQRITLYLKEKKYSSCAWEVVRAEIMRSFSLSTNLQESLRSKE

SEQ ID NO: 2059 - protein, 165 aa, Homo sapiens
  IFN-alpha-2b_L161V
CDLPQTHSLGSRRTLMLLAQMRRISLFSCLKDRHDFGFPQEEFGNQFQKAETIPVLHEMIQQIFNLFSTKDSSAAWDETLLDKFYTELYQQLNDLEACVIQGVGVTETPLMKEDSILAVRKYFQRITLYLKEKKYSPCAWEVVRAEIMRSFSLSTNLQESVRSKE

SEQ ID NO: 2060 - protein, 165 aa, Homo sapiens
  IFN-alpha-2b_L161I
CDLPQTHSLGSRRTLMLLAQMRRISLFSCLKDRHDFGFPQEEFGNQFQKAETIPVLHEMIQQIFNLFSTKDSSAAWDETLLDKFYTELYQQLNDLEACVIQGVGVTETPLMKEDSILAVRKYFQRITLYLKEKKYSPCAWEVVRAEIMRSFSLSTNLQESIRSKE

SEQ ID NO: 2061 - protein, 165 aa, Homo sapiens
  IFN-alpha-2b_R162H
CDLPQTHSLGSRRTLMLLAQMRRISLFSCLKDRHDFGFPQEEFGNQFQKAETIPVLHEMIQQIFNLFSTKDSSAAWDETLLDKFYTELYQQLNDLEACVIQGVGVTETPLMKEDSILAVRKYFQRITLYLKEKKYSPCAWEVVRAEIMRSFSLSTNLQESLHSKE

SEQ ID NO: 2062 - protein, 165 aa, Homo sapiens
  IFN-alpha-2b_R162Q
CDLPQTHSLGSRRTLMLLAQMRRISLFSCLKDRHDFGFPQEEFGNQFQKAETIPVLHEMIQQIFNLFSTKDSSAAWDETLLDKFYTELYQQLNDLEACVIQGVGVTETPLMKEDSILAVRKYFQRITLYLKEKKYSPCAWEVVRAEIMRSFSLSTNLQESLQSKE

SEQ ID NO: 2063 - protein, 165 aa, Homo sapiens
  IFN-alpha-2b_K164Q
CDLPQTHSLGSRRTLMLLAQMRRISLFSCLKDRHDFGFPQEEFGNQFQKAETIPVLHEMIQQIFNLFSTKDSSAAWDETLLDKFYTELYQQLNDLEACVIQGVGVTETPLMKEDSILAVRKYFQRITLYLKEKKYSPCAWEVVRAEIMRSFSLSTNLQESLRSQE

SEQ ID NO: 2064 - protein, 165 aa, Homo sapiens
  IFN-alpha-2b_K164T
CDLPQTHSLGSRRTLMLLAQMRRISLFSCLKDRHDFGFPQEEFGNQFQKAETIPVLHEMIQQIFNLFSTKDSSAAWDETLLDKFYTELYQQLNDLEACVIQGVGVTETPLMKEDSILAVRKYFQRITLYLKEKKYSPCAWEVVRAEIMRSFSLSTNLQESLRSTE

SEQ ID NO: 2065 - protein, 165 aa, Homo sapiens
  IFN-alpha-2b_E165Q
CDLPQTHSLGSRRTLMLLAQMRRISLFSCLKDRHDFGFPQEEFGNQFQKAETIPVLHEMIQQIFNLFSTKDSSAAWDETLLDKFYTELYQQLNDLEACVIQGVGVTETPLMKEDSILAVRKYFQRITLYLKEKKYSPCAWEVVRAEIMRSFSLSTNLQESLRSKQ

SEQ ID NO: 2066 - protein, 165 aa, Homo sapiens
  IFN-alpha-2b_E165H
CDLPQTHSLGSRRTLMLLAQMRRISLFSCLKDRHDFGFPQEEFGNQFQKAETIPVLHEMIQQIFNLFSTKDSSAAWDETLLDKFYTELYQQLNDLEACVIQGVGVTETPLMKEDSILAVRKYFQRITLYLKEKKYSPCAWEVVRAEIMRSFSLSTNLQESLRSKH

SEQ ID NO: 2067 - protein, 165 aa, Homo sapiens [sequence omitted]

SEQ ID NO: 2068 - DNA, 5212 bp, Artificial Sequence
  pET24NAUT-IFN-alpha-2b(E41Q) Plasmid sequence
ctagtcggggaaatgtgcgcggaacccctatttgtttatttttctaaatacattcaaatatgtatccgctcatgaattaattcttagaaaaactcatcgagcatcaaatgaaactgcaatttattcatatcaggattatcaataccatatttttgaaaaagccgtttctgtaatgaaggagaaaactcaccgaggcagttccataggatggcaagatcctggtatcggtctgcgattccgactcgtccaacatcaatacaacctattaatttcccctcgtcaaaaataaggttatcaagtgagaaatcaccatgagtgacgactgaatccggtgagaatggcaaaagtttatgcatttctttccagacttgttcaacaggccagccattacgctcgtcatcaaaatcactcgcatcaaccaaaccgttattcattcgtgattgcgcctgagcgagacgaaatacgcgatcgctgttaaaaggacaattacaaacaggaatcgaatgcaaccggcgcaggaacactgccagcgcatcaacaatattttcacctgaatcaggatattcttctaatacctggaatgctgttttcccggggatcgcagtggtgagtaaccatgcatcatcaggagtacggataaaatgcttgatggtcggaagaggcataaattccgtcagccagtttagtctgaccatctcatctgtaacatcattggcaacgctacctttgccatgtttcagaaacaactctggcgcatcgggcttcccatacaatcgatagattgtcgcacctgattgcccgacattatcgcgagcccatttatacccatataaatcagcatccatgttggaatttaatcgcggcctagagcaagacgtttcccgttgaatatggctcataacaccccttgtattactgtttatgtaagcagacagttttattgttcatgaccaaaatcccttaacgtgagttttcgttccactgagcgtcagaccccgtagaaaagatcaaaggatcttcttgagatcctttttttctgcgcgtaatctgctgcttgcaaacaaaaaaaccaccgctaccagcggtggtttgtttgccggatcaagagctaccaactctttttccgaaggtaactggcttcagcagagcgcagataccaaatactgtccttctagtgtagccgtagttaggccaccacttcaagaactctgtagcaccgcctacatacctcgctctgctaatcctgttaccagtggctgctgccagtggcgataagtcgtgtcttaccgggttggactcaagacgatagttaccggataaggcgcagcggtcgggctgaacggggggttcgtgcacacagcccagcttggagcgaacgacctacaccgaactgagatacctacagcgtgagctatgagaaagcgccacgcttcccgaagggagaaaggcggacaggtatccggtaagcggcagggtcggaacaggagagcgcacgagggagcttccagggggaaacgcctggtatctttatagtcctgtcgggtttcgccacctctgacttgagcgtcgatttttgtgatgctcgtcaggggggcggagcctatggaaaaacgccagcaacgcggcctttttacggttcctggccttttgctggccttttgctcacatgttctttcctgcgttatcccctgattctgtggataaccgtattaccgcctttgagtgagctgataccgctcgccgcagccgaacgaccgagcgcagcgagtcagtgagcgaggaagcggaagagcgcctgatgcggtattttctccttacgcatctgtgcggtatttcacaccgcatatatggtgcactctcagtacaatctgctctgatgccgcatagttaagccagtatacactccgctatcgctacgtgactgggtcatggctgcgccccgacacccgccaacacccgctgacgcgccctgacgggcttgtctgctcccggcatccgcttacagacaagctgtgaccgtctccgggagctgcatgtgtcagaggttttcaccgtcatcaccgaaacgcgcgaggcagctgcggtaaagctcatcagcgtggtcgtgaagcgattcacagatgtctgcctgttcatccgcgtccagctcgttgagtttctccagaagcgttaatgtctggcttctgataaagcgggccatgttaagggcggttttttcctgtttggtcactgatgcctccgtgtaagggggatttctgttcatgggggtaatgataccgatgaaacgagagaggatgctcacgatacgggttactgatgatgaacatgcccggttactggaacgttgtgagggtaaacaactggcggtatggatgcggcgggaccagagaaaaatcactcagggtcaatgccagcgcttcgttaatacagatgtaggtgttccacagggtagccagcagcatcctgcgatgcagatccggaacataatggtgcagggcgctgacttccgcgtttccagactttacgaaacacggaaaccgaagaccattcatgttgttgctcaggtcgcagacgttttgcagcagcagtcgcttcacgttcgctcgcgtatcggtgattcattctgctaaccagtaaggcaaccccgccagcctagccgggtcctcaacgacaggagcacgatcatgcgcacccgtggggccgccatgccggcgataatggcctgcttctcgccgaaacgtttggtggcgggaccagtgacgaaggcttgagcgagggcgtgcaagattccgaataccgcaagcgacaggccgatcatcgtcgcgctccagcgaaagcggtcctcgccgaaaatgacccagagcgctgccggcacctgtcctacgagttgcatgataaagaagacagtcataagtgcggcgacgatagtcatgccccgcgcccaccggaaggagctgactgggttgaaggctctcaagggcatcggtcgagatcccggtgcctaatgagtgagctaacttacattaattgcgttgcgctcactgcccgctttccagtcgggaaacctgtcgtgccagctgcattaatgaatcggccaacgcgcggggagaggcggtttgcgtattgggcgccagggtggtttttcttttcaccagtgagacgggcaacagctgattgcccttcaccgcctggccctgagagagttgcagcaagcggtccacgctggtttgccccagcaggcgaaaatcctgtttgatggtggttaacggcgggatataacatgagctgtcttcggtatcgtcgtatcccactaccgagatatccgcaccaacgcgcagcccggactcggtaatggcgcgcattgcgcccagcgccatctgatcgttggcaaccagcatcgcagtgggaacgatgccctcattcagcatttgcatggtttgttgaaaaccggacatggcactccagtcgccttcccgttccgctatcggctgaatttgattgcgagtgagatatttatgccagccagccagacgcagacgcgccgagacagaacttaatgggcccgctaacagcgcgatttgctggtgacccaatgcgaccagatgctccacgcccagtcgcgtaccgtcttcatgggagaaaataatactgttgatgggtgtctggtcagagacatcaagaaataacgccggaacattagtgcaggcagcttccacagcaatggcatcctggtcatccagcggatagttaatgatcagcccactgacgcgttgcgcgagaagattgtgcaccgccgctttacaggcttcgacgccgcttcgttctaccatcgacaccaccacgctggcacccagttgatcggcgcgagatttaatcgccgcgacaatttgcgacggcgcgtgcagggccagactggaggtggcaacgccaatcagcaacgactgtttgcccgccagttgttgtgccacgcggttgggaatgtaattcagctccgccatcgccgcttccactttttcccgcgttttcgcagaaacgtggctggcctggttcaccacgcgggaaacggtctgataagagacaccggcatactctgcgacatcgtataacgttactggtttcacattcaccaccctgaattgactctcttccgggcgctatcatgccataccgcgaaaggttttgcgccattcgatggtgtccgggatctcgacgctctcccttatgcgactcctgcattaggaagcagcccagtagtaggttgaggccgttgagcaccgccgccgcaaggaatggtgcatgcaaggagatggcgcccaacagtcccccggccacggggcctgccaccatacccacgccgaaacaagcgctcatgagcccgaagtggcgagcccgatcttccccatcggtgatgtcggcgatataggcgccagcaaccgcacctgtggcgccggtgatgccggccacgatgcgtccggcgtagaggatcgagatctcgatcccgcgaaattaatacgactcactataggggaattgtgagcggataacaattcccctctagaaataattttgtttaactttaagaaggagatatacatatgtgtgatctgcctcaaacccacagcctgggtagccgtcgtaccttgatgctcctggcacagatgcgtcgtatctctcttttctcctgcttgaaggaccgtcatgactttggatttccgcagcaggagtttggcaaccagttccaaaaggctgaaaccatccctgtcctccatgagatgatccagcagatcttcaatctcttcagcacaaaggactcatctgctgcttgggatgagaccctcctagacaaattctacactgaactctaccagcagctgaatgacctggaagcctgtgtgatacagggggtgggggtgacagagactcccctgatgaaggaggactccattctggctgtgaggaaatacttccaaagaatcactctctatctgaaagagaagaaatacagcccttgtgcctgggaggttgtcagagcagaaatcatgagatctttttctttgtcaacaaacttgcaagaaagtttaagaagtaaggaataaggatccgaattcgagctccgtcgacaagcttgcggccgcactcgatgagcaataactagcataaccccttggggcctctaaacgggtcttgaggggttttttgctgaaaggaggaa

SEQ ID NO: 2069 - DNA, 5310 bp, Artificial Sequence
  pET24a(+) Plasmid sequence
atccggatatagttcctcctttcagcaaaaaacccctcaagacccgtttagaggccccaaggggttatgctagttattgctcagcggtggcagcagccaactcagcttcctttcgggctttgttagcagccggatctcagtggtggtggtggtggtgctcgagtgcggccgcaagcttgtcgacggagctcgaattcggatccgcgacccatttgctgtccaccagtcatgctagccatatgtatatctccttcttaaagttaaacaaaattatttctagaggggaattgttatccgctcacaattcccctatagtgagtcgtattaatttcgcgggatcgagatctcgatcctctacgccggacgcatcgtggccggcatcaccggcgccacaggtgcggttgctggcgcctatatcgccgacatcaccgatggggaagatcgggctcgccacttcgggctcatgagcgcttgtttcggcgtgggtatggtggcaggccccgtggccgggggactgttgggcgccatctccttgcatgcaccattccttgcggcggcggtgctcaacggcctcaacctactactgggctgcttcctaatgcaggagtcgcataagggagagcgtcgagatcccggacaccatcgaatggcgcaaaacctttcgcggtatggcatgatagcgcccggaagagagtcaattcagggtggtgaatgtgaaaccagtaacgttatacgatgtcgcagagtatgccggtgtctcttatcagaccgtttcccgcgtggtgaaccaggccagccacgtttctgcgaaaacgcgggaaaaagtggaagcggcgatggcggagctgaattacattcccaaccgcgtggcacaacaactggcgggcaaacagtcgttgctgattggcgttgccacctccagtctggccctgcacgcgccgtcgcaaattgtcgcggcgattaaatctcgcgccgatcaactgggtgccagcgtggtggtgtcgatggtagaacgaagcggcgtcgaagcctgtaaagcggcggtgcacaatcttctcgcgcaacgcgtcagtgggctgatcattaactatccgctggatgaccaggatgccattgctgtggaagctgcctgcactaatgttccggcgttatttcttgatgtctctgaccagacacccatcaacagtattattttctcccatgaagacggtacgcgactgggcgtggagcatctggtcgcattgggtcaccagcaaatcgcgctgttagcgggcccattaagttctgtctcggcgcgtctgcgtctggctggctggcataaatatctcactcgcaatcaaattcagccgatagcggaacgggaaggcgactggagtgccatgtccggttttcaacaaaccatgcaaatgctgaatgagggcatcgttcccactgcgatgctggttgccaacgatcagatggcgctgggcgcaatgcgcgccattaccgagtccgggctgcgcgttggtgcggatatctcggtagtgggatacgacgataccgaagacagctcatgttatatcccgccgttaaccaccatcaaacaggattttcgcctgctggggcaaaccagcgtggaccgcttgctgcaactctctcagggccaggcggtgaagggcaatcagctgttgcccgtctcactggtgaaaagaaaaaccaccctggcgcccaatacgcaaaccgcctctccccgcgcgttggccgattcattaatgcagctggcacgacaggtttcccgactggaaagcgggcagtgagcgcaacgcaattaatgtaagttagctcactcattaggcaccgggatctcgaccgatgcccttgagagccttcaacccagtcagctccttccggtgggcgcggggcatgactatcgtcgccgcacttatgactgtcttctttatcatgcaactcgtaggacaggtgccggcagcgctctgggtcattttcggcgaggaccgctttcgctggagcgcgacgatgatcggcctgtcgcttgcggtattcggaatcttgcacgccctcgctcaagccttcgtcactggtcccgccaccaaacgtttcggcgagaagcaggccattatcgccggcatggcggccccacgggtgcgcatgatcgtgctcctgtcgttgaggacccggctaggctggcggggttgccttactggttagcagaatgaatcaccgatacgcgagcgaacgtgaagcgactgctgctgcaaaacgtctgcgacctgagcaacaacatgaatggtcttcggtttccgtgtttcgtaaagtctggaaacgcggaagtcagcgccctgcaccattatgttccggatctgcatcgcaggatgctgctggctaccctgtggaacacctacatctgtattaacgaagcgctggcattgaccctgagtgatttttctctggtcccgccgcatccataccgccagttgtttaccctcacaacgttccagtaaccgggcatgttcatcatcagtaacccgtatcgtgagcatcctctctcgtttcatcggtatcattacccccatgaacagaaatcccccttacacggaggcatcagtgaccaaacaggaaaaaaccgcccttaacatggcccgctttatcagaagccagacattaacgcttctggagaaactcaacgagctggacgcggatgaacaggcagacatctgtgaatcgcttcacgaccacgctgatgagctttaccgcagctgcctcgcgcgtttcggtgatgacggtgaaaacctctgacacatgcagctcccggagacggtcacagcttgtctgtaagcggatgccgggagcagacaagcccgtcagggcgcgtcagcgggtgttggcgggtgtcggggcgcagccatgacccagtcacgtagcgatagcggagtgtatactggcttaactatgcggcatcagagcagattgtactgagagtgcaccatatatgcggtgtgaaataccgcacagatgcgtaaggagaaaataccgcatcaggcgctcttccgcttcctcgctcactgactcgctgcgctcggtcgttcggctgcggcgagcggtatcagctcactcaaaggcggtaatacggttatccacagaatcaggggataacgcaggaaagaacatgtgagcaaaaggccagcaaaaggccaggaaccgtaaaaaggccgcgttgctggcgtttttccataggctccgcccccctgacgagcatcacaaaaatcgacgctcaagtcagaggtggcgaaacccgacaggactataaagataccaggcgtttccccctggaagctccctcgtgcgctctcctgttccgaccctgccgcttaccggatacctgtccgcctttctcccttcgggaagcgtggcgctttctcatagctcacgctgtaggtatctcagttcggtgtaggtcgttcgctccaagctgggctgtgtgcacgaaccccccgttcagcccgaccgctgcgccttatccggtaactatcgtcttgagtccaacccggtaagacacgacttatcgccactggcagcagccactggtaacaggattagcagagcgaggtatgtaggcggtgctacagagttcttgaagtggtggcctaactacggctacactagaaggacagtatttggtatctgcgctctgctgaagccagttaccttcggaaaaagagttggtagctcttgatccggcaaacaaaccaccgctggtagcggtggtttttttgtttgcaagcagcagattacgcgcagaaaaaaaggatctcaagaagatcctttgatcttttctacggggtctgacgctcagtggaacgaaaactcacgttaagggattttggtcatgaacaataaaactgtctgcttacataaacagtaatacaaggggtgttatgagccatattcaacgggaaacgtcttgctctaggccgcgattaaattccaacatggatgctgatttatatgggtataaatgggctcgcgataatgtcgggcaatcaggtgcgacaatctatcgattgtatgggaagcccgatgcgccagagttgtttctgaaacatggcaaaggtagcgttgccaatgatgttacagatgagatggtcagactaaactggctgacggaatttatgcctcttccgaccatcaagcattttatccgtactcctgatgatgcatggttactcaccactgcgatccccgggaaaacagcattccaggtattagaagaatatcctgattcaggtgaaaatattgttgatgcgctggcagtgttcctgcgccggttgcattcgattcctgtttgtaattgtccttttaacagcgatcgcgtatttcgtctcgctcaggcgcaatcacgaatgaataacggtttggttgatgcgagtgattttgatgacgagcgtaatggctggcctgttgaacaagtctggaaagaaatgcataaacttttgccattctcaccggattcagtcgtcactcatggtgatttctcacttgataaccttatttttgacgaggggaaattaataggttgtattgatgttggacgagtcggaatcgcagaccgataccaggatcttgccatcctatggaactgcctcggtgagttttctccttcattacagaaacggctttttcaaaaatatggtattgataatcctgatatgaataaattgcagtttcatttgatgctcgatgagtttttctaagaattaattcatgagcggatacatatttgaatgtatttagaaaaataaacaaataggggttccgcgcacatttccccgaaaagtgccacctgaaattgtaaacgttaatattttgttaaaattcgcgttaaatttttgttaaatcagctcattttttaaccaataggccgaaatcggcaaaatcccttataaatcaaaagaatagaccgagatagggttgagtgttgttccagtttggaacaagagtccactattaaagaacgtggactccaacgtcaaagggcgaaaaaccgtctatcagggcgatggcccactacgtgaaccatcaccctaatcaagttttttggggtcgaggtgccgtaaagcactaaatcggaaccctaaagggagcccccgatttagagcttgacggggaaagccggcgaacgtggcgagaaaggaagggaagaaagcgaaaggagcgggcgctagggcgctggcaagtgtagcggtcacgctgcgcgtaaccaccacacccgccgcgcttaatgcgccgctacagggcgcgtcccattcgcca

SEQ ID NO: 2070 - DNA, 3956 bp, Artificial Sequence
  pTopo-TA (pCR4-TOPO) Plasmid sequence
agcgcccaatacgcaaaccgcctctccccgcgcgttggccgattcattaatgcagctggcacgacaggtttcccgactggaaagcgggcagtgagcgcaacgcaattaatgtgagttagctcactcattaggcaccccaggctttacactttatgcttccggctcgtatgttgtgtggaattgtgagcggataacaatttcacacaggaaacagctatgaccatgattacgccaagctcagaattaaccctcactaaagggactagtcctgcaggtttaaacgaattcgcccttaagggcgaattcgcggccgctaaattcaattcgccctatagtgagtcgtattacaattcactggccgtcgttttacaacgtcgtgactgggaaaaccctggcgttacccaacttaatcgccttgcagcacatccccctttcgccagctggcgtaatagcgaagaggcccgcaccgatcgcccttcccaacagttgcgcagcctatacgtacggcagtttaaggtttacacctataaaagagagagccgttatcgtctgtttgtggatgtacagagtgatattattgacacgccggggcgacggatggtgatccccctggccagtgcacgtctgctgtcagataaagtctcccgtgaactttacccggtggtgcatatcggggatgaaagctggcgcatgatgaccaccgatatggccagtgtgccggtctccgttatcggggaagaagtggctgatctcagccaccgcgaaaatgacatcaaaaacgccattaacctgatgttctggggaatataaatgtcaggcatgagattatcaaaaaggatcttcacctagatccttttcacgtagaaagccagtccgcagaaacggtgctgaccccggatgaatgtcagctactgggctatctggacaagggaaaacgcaagcgcaaagagaaagcaggtagcttgcagtgggcttacatggcgatagctagactgggcggttttatggacagcaagcgaaccggaattgccagctggggcgccctctggtaaggttgggaagccctgcaaagtaaactggatggctttcttgccgccaaggatctgatggcgcaggggatcaagctctgatcaagagacaggatgaggatcgtttcgcatgattgaacaagatggattgcacgcaggttctccggccgcttgggtggagaggctattcggctatgactgggcacaacagacaatcggctgctctgatgccgccgtgttccggctgtcagcgcaggggcgcccggttctttttgtcaagaccgacctgtccggtgccctgaatgaactgcaagacgaggcagcgcggctatcgtggctggccacgacgggcgttccttgcgcagctgtgctcgacgttgtcactgaagcgggaagggactggctgctattgggcgaagtgccggggcaggatctcctgtcatctcaccttgctcctgccgagaaagtatccatcatggctgatgcaatgcggcggctgcatacgcttgatccggctacctgcccattcgaccaccaagcgaaacatcgcatcgagcgagcacgtactcggatggaagccggtcttgtcgatcaggatgatctggacgaagagcatcaggggctcgcgccagccgaactgttcgccaggctcaaggcgagcatgcccgacggcgaggatctcgtcgtgacccatggcgatgcctgcttgccgaatatcatggtggaaaatggccgcttttctggattcatcgactgtggccggctgggtgtggcggaccgctatcaggacatagcgttggctacccgtgatattgctgaagagcttggcggcgaatgggctgaccgcttcctcgtgctttacggtatcgccgctcccgattcgcagcgcatcgccttctatcgccttcttgacgagttcttctgaattattaacgcttacaatttcctgatgcggtattttctccttacgcatctgtgcggtatttcacaccgcatcaggtggcacttttcggggaaatgtgcgcggaacccctatttgtttatttttctaaatacattcaaatatgtatccgctcatgagattatcaaaaaggatcttcacctagatccttttaaattaaaaatgaagttttaaatcaatctaaagtatatatgagtaaacttggtctgacagttaccaatgcttaatcagtgaggcacctatctcagcgatctgtctatttcgttcatccatagttgcctgactccccgtcgtgtagataactacgatacgggagggcttaccatctggccccagtgctgcaatgataccgcgagacccacgctcaccggctccagatttatcagcaataaaccagccagccggaagggccgagcgcagaagtggtcctgcaactttatccgcctccatccagtctattaattgttgccgggaagctagagtaagtagttcgccagttaatagtttgcgcaacgttgttgccattgctacaggcatcgtggtgtcacgctcgtcgtttggtatggcttcattcagctccggttcccaacgatcaaggcgagttacatgatcccccatgttgtgcaaaaaagcggttagctccttcggtcctccgatcgttgtcagaagtaagttggccgcagtgttatcactcatggttatggcagcactgcataattctcttactgtcatgccatccgtaagatgcttttctgtgactggtgagtactcaaccaagtcattctgagaatagtgtatgcggcgaccgagttgctcttgcccggcgtcaatacgggataataccgcgccacatagcagaactttaaaagtgctcatcattggaaaacgttcttcggggcgaaaactctcaaggatcttaccgctgttgagatccagttcgatgtaacccactcgtgcacccaactgatcttcagcatcttttactttcaccagcgtttctgggtgagcaaaaacaggaaggcaaaatgccgcaaaaaagggaataagggcgacacggaaatgttgaatactcatactcttcctttttcaatattattgaagcatttatcagggttattgtctcatgaccaaaatcccttaacgtgagttttcgttccactgagcgtcagaccccgtagaaaagatcaaaggatcttcttgagatcctttttttctgcgcgtaatctgctgcttgcaaacaaaaaaaccaccgctaccagcggtggtttgtttgccggatcaagagctaccaactctttttccgaaggtaactggcttcagcagagcgcagataccaaatactgttcttctagtgtagccgtagttaggccaccacttcaagaactctgtagcaccgcctacatacctcgctctgctaatcctgttaccagtggctgctgccagtggcgataagtcgtgtcttaccgggttggactcaagacgatagttaccggataaggcgcagcggtcgggctgaacggggggttcgtgcacacagcccagcttggagcgaacgacctacaccgaactgagatacctacagcgtgagctatgagaaagcgccacgcttcccgaagggagaaaggcggacaggtatccggtaagcggcagggtcggaacaggagagcgcacgagggagcttccagggggaaacgcctggtatctttatagtcctgtcgggtttcgccacctctgacttgagcgtcgatttttgtgatgctcgtcaggggggcggagcctatggaaaaacgccagcaacgcggcctttttacggttcctggccttttgctggccttttgctcacatgttctttcctgcgttatcccctgattctgtggataaccgtattaccgcctttgagtgagctgataccgctcgccgcagccgaacgaccgagcgcagcgagtcagtgagcgaggaagcggaag

SEQ ID NO: 2071 - protein, 165 aa, Homo sapiens; identical to SEQ ID NO: 1995
  IFN-alpha-2b(E41Q)

SEQ ID NO: 2072 - DNA, 55 bp, Artificial Sequence
  EcoRI Forward Mutagenesis Primer
gcctgtatgatttattggatgttggaattccctgatgcggtattttctccttacg

SEQ ID NO: 2073 - DNA, 55 bp, Artificial Sequence
  EcoRI Reverse Mutagenesis Primer
cgtaaggagaaaataccgcatcagggaattccaacatccaataaatcatacaggc

SEQ ID NO: 2074 - DNA, 35 bp, Artificial Sequence
  ClaI Forward Sequencing Primer
ctgattatcaaccggggtacatatgattgacatgc

SEQ ID NO: 2075 - DNA, 31 bp, Artificial Sequence
  XmnI Reverse Sequencing Primer
tacgggataataccgcgccacatagcagaac

SEQ ID NO: 2076 - DNA, 18 bp, Artificial Sequence
  Forward Sequencing Primer
cctgatgaaggaggactc

SEQ ID NO: 2077 - DNA, 18 bp, Artificial Sequence
  Reverse Sequencing Primer
ccaagcagcagatgagtc

SEQ ID NO: 2078 - protein, 188 aa, Homo sapiens
  IFN-alpha-2b (WT) precursor
MALTFALLVALLVLSCKSSCSVGCDLPQTHSLGSRRTLMLLAQMRRISLFSCLKDRHDFGFPQEEFGNQFQKAETIPVLHEMIQQIFNLFSTKDSSAAWDETLLDKFYTELYQQLNDLEACVIQGVGVTETPLMKEDSILAVRKYFQRITLYLKEKKYSPCAWEVVRAEIMRSFSLSTNLQESLRSKE

SEQ ID NO: 2079 - protein, 165 aa, Homo sapiens [sequence omitted]

SEQ ID NO: 2080 - DNA, 31 bp, Artificial Sequence
  IFN-alpha-2b Forward Primer
tcagctgcaagtcaagctgctctgtgggctg

SEQ ID NO: 2081 - DNA, 48 bp, Artificial Sequence
  IFN-alpha-2b Reverse XbaI Primer
gctctagatcattccttacttcttaaactttcttgcaagtttgttgac

SEQ ID NO: 2082 - DNA, 80 bp, Artificial Sequence
  IFN-alpha-2b Forward HIndIII Primer
cccaagcttatggccttgacctttgctttactggtggccctcctggtgctcagctgcaagtcaagctgctctgtgggctg

SEQ ID NO: 2083 - DNA, 41 bp, Artificial Sequence
  IFNA Forward Primer
aacatatgtgtgatctgcctcaaacccacagcctgggtagc

SEQ ID NO: 2084 - DNA, 46 bp, Artificial Sequence
  IFNA Reverse Primer
aaggatcctcattccttacttcttaaactttcttgcaagtttgttg

SEQ ID NO: 2085 - DNA, 38 bp, Artificial Sequence
  ARG12/13 5' Mutagenesis Primer
cacagcctgggtagccgtcgtaccttgatgctcctggc

SEQ ID NO: 2086 - DNA, 38 bp, Artificial Sequence
  ARG12/13-3' Mutagenesis Primer
gccaggagcatcaaggtacgacggctacccaggctgtg

SEQ ID NO: 2087 - DNA, 42 bp, Artificial Sequence
  ARG22/23-5' Mutagenesis Primer
atgctcctggcacagatgcgtcgtatctctcttttctcctgc

SEQ ID NO: 2088 - DNA, 42 bp, Artificial Sequence
  ARG22/23-3' Mutagenesis Primer
gcaggagaaaagagagatacgacgcatctgtgccaggagcat

SEQ ID NO: 2089 - DNA, 52 bp, Artificial Sequence
  ARG33/PRO39-5' Mutagenesis Primer
ctcctgcttgaaggaccgtcatgactttggatttccgcaggaggagtttggc

SEQ ID NO: 2090 - DNA, 52 bp, Artificial Sequence
  ARG33/PRO39-3' Mutagenesis Primer
gccaaactcctcctgcggaaatccaaagtcatgacggtccttcaagcaggag

SEQ ID NO: 2091 - DNA, 35 bp, Artificial Sequence
  IFNATAA5' Mutagenesis Primer
gtttaagaagtaaggaataaggatccttaagggcg

SEQ ID NO: 2092 - DNA, 35 bp, Artificial Sequence
  IFNATAA3' Mutagenesis Primer
cgcccttaaggatccttattccttacttcttaaac

SEQ ID NO: 2093 - DNA, 36 bp, Artificial Sequence
  1SPEI5' Mutagenesis Primer
gctgaaaggaggaactagttccggattggcgaatgg

SEQ ID NO: 2094 - DNA, 36 bp, Artificial Sequence
  1SPEI3' Mutagenesis Primer
ccattcgccaatccggaactagttcctcctttcagc

SEQ ID NO: 2095 - DNA, 35 bp, Artificial Sequence
  2SPEI5' Mutagenesis Primer
caatttcaggtggcactagtcggggaaatgtgcgc

SEQ ID NO: 2096 - DNA, 35 bp, Artificial Sequence
  2SPEI3' Mutagenesis Primer
gcgcacatttccccgactagtgccacctgaaattg

SEQ ID NO: 2097 - DNA, 18 bp, Artificial Sequence
  IFNAT71 Sequencing Primer
ctgggaggttgtcagagc

SEQ ID NO: 2098 - DNA, 17 bp, Artificial Sequence
  pET24T72 Sequencing Primer
accatgagtgacgactg

SEQ ID NO: 2099 - DNA, 18 bp, Artificial Sequence
  pET24T73 Sequencing Primer
cccgacattatcgcgagc

SEQ ID NO: 2100 - DNA, 18 bp, Artificial Sequence
  pET24T74 Sequencing Primer
tcaagacgatagttaccg

SEQ ID NO: 2101 - DNA, 18 bp, Artificial Sequence
  pET24T75 Sequencing Primer
ctccttacgcatctgtgc

SEQ ID NO: 2102 - DNA, 18 bp, Artificial Sequence
  pET24T76 Sequencing Primer
tactgatgatgaacatgc

SEQ ID NO: 2103 - DNA, 18 bp, Artificial Sequence
  pET24T77 Sequencing Primer
tcatcgtcgcgctccagc

SEQ ID NO: 2104 - DNA, 18 bp, Artificial Sequence
  pET24T78 Sequencing Primer
atccgcaccaacgcgcag

SEQ ID NO: 2105 - DNA, 18 bp, Artificial Sequence
  pET24T79 Sequencing Primer
tcgttctaccatcgacac

SEQ ID NO: 2106 - DNA, 18 bp, Artificial Sequence
  pET24T710 Sequencing Primer
gcatgcaaggagatggcg

SEQ ID NO: 2107 - DNA, 36 bp, Artificial Sequence
  E41QMUT4 Mutagenesis Primer
gactttggatttccgcagcaggagtttggcaaccag

SEQ ID NO: 2108 - DNA, 36 bp, Artificial Sequence
  E41QMUT4C Mutagenesis Primer
ctggttgccaaactcctgctgcggaaatccaaagtc

SEQ ID NO: 2109 - DNA, 32 bp, Artificial Sequence
  GH1 Forward PCR Primer
atggctacaggctcccggacgtccctgcctcc

SEQ ID NO: 2110 - DNA, 37 bp, Artificial Sequence
  GH1 Reverse PCR Primer
ctagaagccacaagctgcccctccacagagcggcact

SEQ ID NO: 2111 - DNA, 30 bp, Artificial Sequence
  hGHFORHIND PCR Primer
aaaaagcttatggctacaggctcccggacg

SEQ ID NO: 2112 - DNA, 32 bp, Artificial Sequence
  hGHREV PCR Primer
gcccttctagaagccacagctgccctccacag

SEQ ID NO: 2113 - DNA, 38 bp, Artificial Sequence
  hGHFORPET PCR Primer
gggaattccatatgttcccgaccattccgttatccagg

SEQ ID NO: 2114 - DNA, 39 bp, Artificial Sequence
  hGHREVRET PCR Primer
cgggatcccttaagaagccacagctgccctccacagagc

SEQ ID NO: 2115 - DNA, 31 bp, Artificial Sequence
  hGHARG8FOR Mutagenesis Primer
ccgaccattccgttacccgtctttttgacaa

SEQ ID NO: 2116 - DNA, 32 bp, Artificial Sequence
  hGHARG8REV Mutagenesis Primer
gagcatagcgttgtcaaaaagacgggataacg

SEQ ID NO: 2117 - DNA, 36 bp, Artificial Sequence
  hGHARG16FOR Mutagenesis Primer
gacaacgctatgctccgtgcccatcgtctgcaccag

SEQ ID NO: 2118 - DNA, 36 bp, Artificial Sequence
  hGHARG16REV Mutagenesis Primer
ctggtgcagacgatgggcacggagcatagcgttgtc

SEQ ID NO: 2119 - DNA, 3821 bp, Artificial Sequence
  pNAUT hGH vector
gcgcccaatacgcaaaccgcctctccccgcgcgttggccgattcattaatgcagctgctaggggttccttgtagttaatgattaacccgccatgctacttatctactatgccaagtacgccccctattgacgtcaatgacggtaaatggcccgcctggcattatgcccagtacatgaccttatgggactttcctacttggcagtacatctacgtattagtcatcgctattaccatggtgatgcggttttggcagtacatcaatgggcgtggatagcggtttgactcacggggatttccaagtctccaccccattgacgtcaatgggagtttgttttggcaccaaaatcaacgggactttccaaaatgtcgtaacaactccgccccattgacgcaaatgggcggtaggcgtgtacggtgggaggtctatataagcagagctctctggctaactagagaacccactgcttactggcttatcgaaattaatacgactcactatagggagacccaagcttatggctacaggctcccggacgtccctgctcctggcttttggcctgctctgcctgccctggcttcaagagggcagtgccttcccaaccattcccttatccaggctttttgacaacgctatgctccgcgcccatcgtctgcaccagctggcctttgacacctaccaggagtttgaagaagcctatatcccaaaggaacagaagtattcattcctgcagaacccccagacctccctctgtttctcagagtctattccgacaccctccaacagggaggaaacacaacagaaatccaacctagagctgctccgcatctccctgctgctcatccagtcgtggctggagcccgtgcagttcctcaggagtgtcttcgccaacagcctggtgtacggcgcctctgacagcaacgtctatgacctcctaaaggacctagaggaaggcatccaaacgctgatggggaggctggaagatggcagcccccggactgggcagatcttcaagcagacctacagcaagttcgacacaaactcacacaacgatgacgcactactcaagaactacgggctgctctactgcttcaggaaggacatggacaaggtcgagacattcctgcgcatcgtgcagtgccgctctgtggagggcagctgtggcttctagagggccctattctatagtgtcacctaaatgctagagctcgctgatcagcctcgactgtgccttctagttgccagccatctgttgtttgcccctcccccgtgccttccttgaccctggaaggtgccactcccactgtcctttcctaataaaatgaggaaattgcatcgcattgtctgagtaggtgtcattctattctggggggtggggtggggcaggacagcaagggggaggattgggaagacaatagcaggcatgctggggatgcggtgggctctatggcttctgaggcggaaagaaccaggtagataagtagcatggcgggttaatcattaactacacagctggcgtaatagcgaagaggcccgcaccgatcgcccttcccaacagttgcgcagcctgaatggcgaatggcgcctgatgcggtattttctccttacgcatctgtgcggtatttcacaccgcatatggtgcactctcagtacaatctgctctgatgccgcatagttaagccagccccgacacccgccaacacccgctgacgcgccctgacgggcttgtctgctcccggcatccgcttacagacaagctgtgaccgtctccgggagctgcatgtgtcagaggttttcaccgtcatcaccgaaacgcgcgagacgaaagggcctcgtgatacgcctatttttataggttaatgtcatgataataatggtttcttagacgtcaggtggcacttttcggggaaatgtgcgcggaacccctatttgtttatttttctaaatacattcaaatatgtatccgctcatgagacaataaccctgataaatgcttcaataatattgaaaaaggaagagtatgagtattcaacatttccgtgtcgcccttattcccttttttgcggcattttgccttcctgtttttgctcacccagaaacgctggtgaaagtaaaagatgctgaagatcagttgggtgcacgagtgggttacatcgaactggatctcaacagcggtaagatccttgagagttttcgccccgaagaacgttttccaatgatgagcacttttaaagttctgctatgtggcgcggtattatcccgtattgacgccgggcaagagcaactcggtcgccgcatacactattctcagaatgacttggttgagtactcaccagtcacagaaaagcatcttacggatggcatgacagtaagagaattatgcagtgctgccataaccatgagtgataacactgcggccaacttacttctgacaacgatcggaggaccgaaggagctaaccgcttttttgcacaacatgggggatcatgtaactcgccttgatcgttgggaaccggagctgaatgaagccataccaaacgacgagcgtgacaccacgatgcctgtagcaatggcaacaacgttgcgcaaactattaactggcgaactacttactctagcttcccggcaacaattaatagactggatggaggcggataaagttgcaggaccacttctgcgctcggcccttccggctggctggtttattgctgataaatctggagccggtgagcgtgggtctcgcggtatcattgcagcactggggccagatggtaagccctcccgtatcgtagttatctacacgacggggagtcaggcaactatggatgaacgaaatagacagatcgctgagataggtgcctcactgattaagcattggtaactgtcagaccaagtttactcatatatactttagattgatttaaaacttcatttttaatttaaaaggatctaggtgaagatcctttttgataatctcatgaccaaaatcccttaacgtgagttttcgttccactgagcgtcagaccccgtagaaaagatcaaaggatcttcttgagatcctttttttctgcgcgtaatctgctgcttgcaaacaaaaaaaccaccgctaccagcggtggtttgtttgccggatcaagagctaccaactctttttccgaaggtaactggcttcagcagagcgcagataccaaatactgtccttctagtgtagccgtagttaggccaccacttcaagaactctgtagcaccgcctacatacctcgctctgctaatcctgttaccagtggctgctgccagtggcgataagtcgtgtcttaccgggttggactcaagacgatagttaccggataaggcgcagcggtcgggctgaacggggggttcgtgcacacagcccagcttggagcgaacgacctacaccgaactgagatacctacagcgtgagctatgagaaagcgccacgcttcccgaagggagaaaggcggacaggtatccggtaagcggcagggtcggaacaggagagcgcacgagggagcttccagggggaaacgcctggtatctttatagtcctgtcgggtttcgccacctctgacttgagcgtcgatttttgtgatgctcgtcaggggggcggagcctatggaaaaacgccagcaacgcggcctttttacggttcctggccttttgctggccttttgctcacatgttctttcctgcgttatcccctgattctgtggataaccgtattaccgcctttgagtgagctgataccgctcgccgcagccgaacgaccgagcgcagcgagtcagtgagcgaggaagcggaaga

SEQ ID NO: 2120 - DNA, 4611 bp, Artificial Sequence
  pTOPO hGH vector
cttccgcttcctcgctcactgactcgctgcgctcggtcgttcggctgcggcgagcggtatcagctcactcaaaggcggtaatacggttatccacagaatcaggggataacgcaggaaagaacatgtgagcaaaaggccagcaaaagcccaggaaccgtaaaaaggccgcgttgctggcgtttttccataggctccgcccccctgacgagcatcacaaaaatcgacgctcaagtcagaggtggcgaaacccgacaggactataaagataccaggcgtttccccctggaagctccctcgtgcgctctcctgttccgaccctgccgcttaccggatacctgtccgcctttctcccttcgggaagcgtggcgctttctcatagctcacgctgtaggtatctcagttcggtgtaggtcgttcgctccaagctgggctgtgtgcacgaaccccccgttcagcccgaccgctgcgccttatccggtaactatcgtcttgagtccaacccggtaagacacgacttatcgccactggcagcagccactggtaacaggattagcagagcgaggtatgtaggcggtgctacagagttcttgaagtggtggcctaactacggctacactagaaggacagtatttggtatctgcgctctgctgaagccagttaccttcggaaaaagagttggtagctcttgatccggcaaacaaaccaccgctggtagcggtggtttttttgtttgcaagcagcagattacgcgcagaaaaaaaggatctcaagaagatcctttgatcttttctacggggtctgacgctcagtggaacgaaaactcacgttaagggattttggtcatgagattatcaaaaaggatcttcacctagatccttttaaattaaaaatgaagttttaaatcaatctaaagtatatatgagtaaacttggtctgacagttaccaatgcttaatcagtgaggcacctatctcagcgatctgtctatttcgttcatccatagttgcctgactccccgtcgtgtagataactacgatacgggagggcttaccatctggccccagtgctgcaatgataccgcgagacccacgctcaccggctccagatttatcagcaataaaccagccagccggaagggccgagcgcagaagtggtcctgcaactttatccgcctccatccagtctattaattgttgccgggaagctagagtaagtagttcgccagttaatagtttgcgcaacgttgttgccattgctacaggcatcgtggtgtcacgctcgtcgtttggtatggcttcattcagctccggttcccaacgatcaaggcgagttacatgatcccccatgttgtgcaaaaaagcggttagctccttcggtcctccgatcgttgtcagaagtaagttggccgcagtgttatcactcatggttatggcagcactgcataattctcttactgtcatgccatccgtaagatgcttttctgtgactggtgagtactcaaccaagtcattctgagaatagtgtatgcggcgaccgagttgctcttgcccggcgtcaatacgggataataccgcgccacatagcagaactttaaaagtgctcatcattggaaaacgttcttcggggcgaaaactctcaaggatcttaccgctgttgagatccagttcgatgtaacccactcgtgcacccaactgatcttcagcatcttttactttcaccagcgtttctgggtgagcaaaaacaggaaggcaaaatgccgcaaaaaagggaataagggcgacacggaaatgttgaatactcatactcttcctttttcaatattattgaagcatttatcagggttattgtctcatgagcggatacatatttgaatgtatttagaaaaataaacaaataggggttccgcgcacatttccccgaaaagtgccacctgtatgcggtgtgaaataccgcacagatgcgtaaggagaaaataccgcatcaggaaattgtaagcgttaataattcagaagaactcgtcaagaaggcgatagaaggcgatgcgctgcgaatcgggagcggcgataccgtaaagcacgaggaagcggtcagcccattcgccgccaagctcttcagcaatatcacgggtagccaacgctatgtcctgatagcggtccgccacacccagccggccacagtcgatgaatccagaaaagcggccattttccaccatgatattcggcaagcaggcatcgccatgggtcacgacgagatcctcgccgtcgggcatgctcgccttgagcctggcgaacagttcggctggcgcgagcccctgatgctcttcgtccagatcatcctgatcgacaagaccggcttccatccgagtacgtgctcgctcgatgcgatgtttcgcttggtggtcgaatgggcaggtagccggatcaagcgtatgcagccgccgcattgcatcagccatgatggatactttctcggcaggagcaaggtgagatgacaggagatcctgccccggcacttcgcccaatagcagccagtcccttcccgcttcagtgacaacgtcgagcacagctgcgcaaggaacgcccgtcgtggccagccacgatagccgcgctgcctcgtcttgcagttcattcagggcaccggacaggtcggtcttgacaaaaagaaccgggcgcccctgcgctgacagccggaacacggcggcatcagagcagccgattgtctgttgtgcccagtcatagccgaatagcctctccacccaagcggccggagaacctgcgtgcaatccatcttgttcaatcatgcgaaacgatcctcatcctgtctcttgatcagagcttgatcccctgcgccatcagatccttggcggcgagaaagccatccagtttactttgcagggcttcccaaccttaccagagggcgccccagctggcaattccggttcgcttgctgtccataaaaccgcccagtctagctatcgccatgtaagcccactgcaagctacctgctttctctttgcgcttgcgttttcccttgtccagatagcccagtagctgacattcatccggggtcagcaccgtttctgcggactggctttctacgtgaaaaggatctaggtgaagatcctttttgataatctcatgcctgacatttatattccccagaacatcaggttaatggcgtttttgatgtcattttcgcggtggctgagatcagccacttcttccccgataacggagaccggcacactggccatatcggtggtcatcatgcgccagctttcatccccgatatgcaccaccgggtaaagttcacgggagactttatctgacagcagacgtgcactggccagggggatcaccatccgtcgccccggcgtgtcaataatatcactctgtacatccacaaacagacgataacggctctctcttttataggtgtaaaccttaaactgccgtacgtataggctgcgcaactgttgggaagggcgatcggtgcgggcctcttcgctattacgccagctggcgaaagggggatgtgctgcaaggcgattaagttgggtaacgccagggttttcccagtcacgacgttgtaaaacgacggccagtgaattgtaatacgactcactatagggcgaattgaatttagcggccgcgaattcgcccttatggctacaggctcccggacgtccctgctcctggcttttggcctgctctgcctgccctggcttcaagagggcagtgccttcccaaccattcccttatccaggctttttgacaacgctatgctccgcgcccatcgtctgcaccagctggcctttgacacctaccaggagtttgaagaagcctatatcccaaaggaacagaagtattcattcctgcagaacccccagacctccctctgtttctcagagtctattccgacaccctccaacagggaggaaacacaacagaaatccaacctagagctgctccgcatctccctgctgctcatccagtcgtggctggagcccgtgcagttcctcaggagtgtcttcgccaacagcctggtgtacggcgcctctgacagcaacgtctatgacctcctaaaggacctagaggaaggcatccaaacgctgatggggaggctggaagatggcagcccccggactgggcagatcttcaagcagacctacagcaagttcgacacaaactcacacaacgatgacgcactactcaagaactacgggctgctctactgcttcaggaaggacatggacaaggtcgagacattcctgcgcatcgtgcagtgccgctctgtggagggcagctgtggcttctagaagggcgaattcgtttaaacctgcaggactagtccctttagtgagggttaattctgagcttggcgtaatcatggtcatagctgtttcctgtgtgaaattgttatccgctcacaattccacacaacatacgagccggaagcataaagtgtaaagcctggggtgcctaatgagtgagctaactcacattaattgcgttgcgctcactgcccgctttccagtcgggaaacctgtcgtgccagctgcattaatgaatcggccaacgcgcggggagaggcggtttgcgtattgggcgct

SEQ ID NO: 2121 - DNA, 5287 bp, Artificial Sequence
  pET24Naut-hGH Plasmid
ctagtcggggaaatgtgcgcggaacccctatttgtttatttttctaaatacattcaaatatgtatccgctcatgaattaattcttagaaaaactcatcgagcatcaaatgaaactgcaatttattcatatcaggattatcaataccatatttttgaaaaagccgtttctgtaatgaaggagaaaactcaccgaggcagttccataggatggcaagatcctggtatcggtctgcgattccgactcgtccaacatcaatacaacctattaatttcccctcgtcaaaaataaggttatcaagtgagaaatcaccatgagtgacgactgaatccggtgagaatggcaaaagtttatgcatttctttccagacttgttcaacaggccagccattacgctcgtcatcaaaatcactcgcatcaaccaaaccgttattcattcgtgattgcgcctgagcgagacgaaatacgcgatcgctgttaaaaggacaattacaaacaggaatcgaatgcaaccggcgcaggaacactgccagcgcatcaacaatattttcacctgaatcaggatattcttctaatacctggaatgctgttttcccggggatcgcagtggtgagtaaccatgcatcatcaggagtacggataaaatgcttgatggtcggaagaggcataaattccgtcagccagtttagtctgaccatctcatctgtaacatcattggcaacgctacctttgccatgtttcagaaacaactctggcgcatcgggcttcccatacaatcgatagattgtcgcacctgattgcccgacattatcgcgagcccatttatacccatataaatcagcatccatgttggaatttaatcgcggcctagagcaagacgtttcccgttgaatatggctcataacaccccttgtattactgtttatgtaagcagacagttttattgttcatgaccaaaatcccttaacgtgagttttcgttccactgagcgtcagaccccgtagaaaagatcaaaggatcttcttgagatcctttttttctgcgcgtaatctgctgcttgcaaacaaaaaaaccaccgctaccagcggtggtttgtttgccggatcaagagctaccaactctttttccgaaggtaactggcttcagcagagcgcagataccaaatactgtccttctagtgtagccgtagttaggccaccacttcaagaactctgtagcaccgcctacatacctcgctctgctaatcctgttaccagtggctgctgccagtggcgataagtcgtgtcttaccgggttggactcaagacgatagttaccggataaggcgcagcggtcgggctgaacggggggttcgtgcacacagcccagcttggagcgaacgacctacaccgaactgagatacctacagcgtgagctatgagaaagcgccacgcttcccgaagggagaaaggcggacaggtatccggtaagcggcagggtcggaacaggagagcgcacgagggagcttccagggggaaacgcctggtatctttatagtcctgtcgggtttcgccacctctgacttgagcgtcgatttttgtgatgctcgtcaggggggcggagcctatggaaaaacgccagcaacgcggcctttttacggttcctggccttttgctggccttttgctcacatgttctttcctgcgttatcccctgattctgtggataaccgtattaccgcctttgagtgagctgataccgctcgccgcagccgaacgaccgagcgcagcgagtcagtgagcgaggaagcggaagagcgcctgatgcggtattttctccttacgcatctgtgcggtatttcacaccgcaatggtgcactctcagtacaatctgctctgatgccgcatagttaagccagtatacactccgctatcgctacgtgactgggtcatggctgcgccccgacacccgccaacacccgctgacgcgccctgacgggcttgtctgctcccggcatccgcttacagacaagctgtgaccgtctccgggagctgcatgtgtcagaggttttcaccgtcatcaccgaaacgcgcgaggcagctgcggtaaagctcatcagcgtggtcgtgaagcgattcacagatgtctgcctgttcatccgcgtccagctcgttgagtttctccagaagcgttaatgtctggcttctgataaagcgggccatgttaagggcggttttttcctgtttggtcactgatgcctccgtgtaagggggatttctgttcatgggggtaatgataccgatgaaacgagagaggatgctcacgatacgggttactgatgatgaacatgcccggttactggaacgttgtgagggtaaacaactggcggtatggatgcggcgggaccagagaaaaatcactcagggtcaatgccagcgcttcgttaatacagatgtaggtgttccacagggtagccagcagcatcctgcgatgcagatccggaacataatggtgcagggcgctgacttccgcgtttccagactttacgaaacacggaaaccgaagaccattcatgttgttgctcaggtcgcagacgttttgcagcagcagtcgcttcacgttcgctcgcgtatcggtgattcattctgctaaccagtaaggcaaccccgccagcctagccgggtcctcaacgacaggagcacgatcatgcgcacccgtggggccgccatgccggcgataatggcctgcttctcgccgaaacgtttggtggcgggaccagtgacgaaggcttgagcgagggcgtgcaagattccgaataccgcaagcgacaggccgatcatcgtcgcgctccagcgaaagcggtcctcgccgaaaatgacccagagcgctgccggcacctgtcctacgagttgcatgataaagaagacagtcataagtgcggcgacgatagtcatgccccgcgcccaccggaaggagctgactgggttgaaggctctcaagggcatcggtcgagatcccggtgcctaatgagtgagctaacttacattaattgcgttgcgctcactgcccgctttccagtcgggaaacctgtcgtgccagctgcattaatgaatcggccaacgcgcggggagaggcggtttgcgtattgggcgccagggtggtttttcttttcaccagtgagacgggcaacagctgattgcccttcaccgcctggccctgagagagttgcagcaagcggtccacgctggtttgccccagcaggcgaaaatcctgtttgatggtggttaacggcgggatataacatgagctgtcttcggtatcgtcgtatcccactaccgagatatccgcaccaacgcgcagcccggactcggtaatggcgcgcattgcgcccagcgccatctgatcgttggcaaccagcatcgcagtgggaacgatgccctcattcagcatttgcatggtttgttgaaaaccggacatggcactccagtcgccttcccgttccgctatcggctgaatttgattgcgagtgagatatttatgccagccagccagacgcagacgcgccgagacagaacttaatgggcccgctaacagcgcgatttgctggtgacccaatgcgaccagatgctccacgcccagtcgcgtaccgtcttcatgggagaaaataatactgttgatgggtgtctggtcagagacatcaagaaataacgccggaacattagtgcaggcagcttccacagcaatggcatcctggtcatccagcggatagttaatgatcagcccactgacgcgttgcgcgagaagattgtgcaccgccgctttacaggcttcgacgccgcttcgttctaccatcgacaccaccacgctggcacccagttgatcggcgcgagatttaatcgccgcgacaatttgcgacggcgcgtgcagggccagactggaggtggcaacgccaatcagcaacgactgtttgcccgccagttgttgtgccacgcggttgggaatgtaattcagctccgccatcgccgcttccactttttcccgcgttttcgcagaaacgtggctggcctggttcaccacgcgggaaacggtctgataagagacaccggcatactctgcgacatcgtataacgttactggtttcacattcaccaccctgaattgactctcttccgggcgctatcatgccataccgcgaaaggttttgcgccattcgatggtgtccgggatctcgacgctctcccttatgcgactcctgcattaggaagcagcccagtagtaggttgaggccgttgagcaccgccgccgcaaggaatggtgcatgcaaggagatggcgcccaacagtcccccggccacggggcctgccaccatacccacgccgaaacaagcgctcatgagcccgaagtggcgagcccgatcttccccatcggtgatgtcggcgatataggcgccagcaaccgcacctgtggcgccggtgatgccggccacgatgcgtccggcgtagaggatcgagatctcgatcccgcgaaattaatacgactcactataggggaattgtgagcggataacaattcccctctagaaataattttgtttaactttaagaaggagatatacatatgttcccgaccattccgttatcccgtctttttgacaacgctatgctccgtgcccatcgtctgcaccagctggcctttgacacctaccaggagtttgaagaagcctatatcccaaaggaacagaagtattcattcctgcagaacccccagacctccctctgtttctcagagtctattccgacaccctccaacagggaggaaacacaacagaaatccaacctagagctgctccgcatctccctgctgctcatccagtcgtggctggagcccgtgcagttcctcaggagtgtcttcgccaacagcctggtgtacggcgcctctgacagcaacgtctatgacctcctaaaggacctagaggaaggcatccaaacgctgatggggaggctggaagatggcagcccccggactgggcagatcttcaagcagacctacagcaagttcgacacaaactcacacaacgatgacgcactactcaagaactacgggctgctctactgcttcaggaaggacatggacaaggtcgagacattcctgcgcatcgtgcagtgccgctctgtggagggcagctgtggcttctaaggatccgaattcgagctccgtcgacaagcttgcggccgcactcgatgagcaataactagcataaccccttggggcctctaaacgggtcttgaggggttttttgctgaaaggaggaa

SEQ ID NO: 2122 - protein, 562 aa, Homo sapiens
  tPA
MDAMKRGLCCVLLLCGAVFVSPSQEIHARFRRGARSYQVICRDEKTQMIYQQHQSWLRPVLRSNRVEYCWCNSGRAQCHSVPVKSCSEPRCFNGGTCQQALYFSDFVCQCPEGFAGKCCEIDTRATCYEDQGISYRGTWSTAESGAECTNWNSSALAQKPYSGRRPDAIRLGLGNHNYCRNPDRDSKPWCYVFKAGKYSSEFCSTPACSEGNSDCYFGNGSAYRGTHSLTESGASCLPWNSMILIGKVYTAQNPSAQALGLGKHNYCRNPDGDAKPWCHVLKNRRLTWEYCDVPSCSTCGLRQYSQPQFRIKGGLFADIASHPWQAAIFAKHRRSPGERFLCGGILISSCWILSAAHCFQERFPPHHLTVILGRTYRVVPGEEEQKFEVEKYIVHKEFDDDTYDNDIALLQLKSDSSRCAQESSVVRTVCLPPADLQLPDWTECELSGYGKHEALSPFYSERLKEAHVRLYPSSRCTSQHLLNRTVTDNMLCAGDTRSGGPQANLHDACQGDSGGPLVCLNDGRMTLVGIISWGLGCGQKDVPGVYTKVTNYLDWIRDNMRP

SEQ ID NO: 2123 - protein, 466 aa, Homo sapiens
  factor VII
MVSQALRLLCLLLGLQGCLAAGGVAKASGGETRDMPWKPGPHRVFVTQEEAHGVLHRRRRANAFLEELRPGSLERECKEEQCSFEEAREIFKDAERTKLFWISYSDGDQCASSPCQNGGSCKDQLQSYICFCLPAFEGRNCETHKDDQLICVNENGGCEQYCSDHTGTKRSCRCHEGYSLLADGVSCTPTVEYPCGKIPILEKRNASKPQGRIVGGKVCPKGECPWQVLLLVNGAQLCGGTLINTIWVVSAAHCFDKIKNWRNLIAVLGEHDLSEHDGDEQSRRVAQVIIPSTYVPGTTNHDIALLRLHQPVVLTDHVVPLCLPERTFSERTLAFVRFSLVSGWGQLLDRGATALELMVLNVPRLMTQDCLQQSRKVGDSPNITEYMFCAGYSDGSKDSCKGDSGGPHATHYRGTWYLTGIVSWGQGCATVGHFGVYTRVSQYIEWLQKLMRSEPRPGVLLRAPFP

SEQ ID NO: 2124 - protein, 2351 aa, Homo sapiens
  factor VIII
MQIELSTCFFLCLLRFCFSATRRYYLGAVELSWDYMQSDLGELPVDARFPPRVPKSFPFNTSVVYKKTLFVEFTDHLFNIAKPRPPWMGLLGPTIQAEVYDTVVITLKNMASHPVSLHAVGVSYWKASEGAEYDDQTSQREKEDDKVFPGGSHTYVWQVLKENGPMASDPLCLTYSYLSHVDLVKDLNSGLIGALLVCREGSLAKEKTQTLHKFILLFAVFDEGKSWHSETKNSLMQDRDAASARAWPKMHTVNGYVNRSLPGLIGCHRKSVYWHVIGMGTTPEVHSIFLEGHTFLVRNHRQASLEISPITFLTAQTLLMDLGQFLLFCHISSHQHDGMEAYVKVDSCPEEPQLRMKNNEEAEDYDDDLTDSEMDVVRFDDDNSPSFIQIRSVAKKHPKTWVHYIAAEEEDWDYAPLVLAPDDRSYKSQYLNNGPQRIGRKYKKVRFMAYTDETFKTREAIQHESGILGPLLYGEVGDTLLIIFKNQASRPYNIYPHGITDVRPLYSRRLPKGVKHLKDFPILPGEIFKYKWTVTVEDGPTKSDPRCLTRYYSSFVNMERDLASGLIGPLLICYKESVDQRGNQIMSDKRNVILFSVFDENRSWYLTENIQRFLPNPAGVQLEDPEFQASNIMHSINGYVFDSLQLSVCLHEVAYWYILSIGAQTDFLSVFFSGYTFKHKMVYEDTLTLFPFSGETVFMSMENPGLWILGCHNSDFRNRGMTALLKVSSCDKNTGDYYEDSYEDISAYLLSKNNAIEPRSFSQNSRHPSTRQKQFNATTIPENDIEKTDPWFAHRTPMPKIQNVSSSDLLMLLRQSPTPHGLSLSDLQEAKYETFSDDPSPGAIDSNNSLSEMTHFRPQLHHSGDMVFTPESGLQLRLNEKLGTTAATELKKLDFKVSSTSNNLISTIPSDNLAAGTDNTSSLGPPSMPVHYDSQLDTTLFGKKSSPLTESGGPLSLSEENNDSKLLESGLMNSQESSWGKNVSSTESGRLFKGKRAHGPALLTKDNALFKVSISLLKTNKTSNNSATNRKTHIDGPSLLIENSPSVWQNILESDTEFKKVTPLIHDRMLMDKNATALRLNHMSNKTTSSKNMEMVQQKKEGPIPPDAQNPDMSFFKMLFLPESARWIQRTHGKNSLNSGQGPSPKQLVSLGPEKSVEGQNFLSEKNKVVVGKGEFTKDVGLKEMVFPSSRNLFLTNLDNLHENNTHNQEKKIQEEIEKKETLIQENVVLPQIHTVTGTKNFMKNLFLLSTRQNVEGSYDGAYAPVLQDFRSLNDSTNRTKKHTAHFSKKGEEENLEGLGNQTKQIVEKYACTTRISPNTSQQNFVTQRSKRALKQFRLPLEETELEKRIIVDDTSTQWSKNMKHLTPSTLTQIDYNEKEKGAITQSPLSDCLTRSHSIPQANRSPLPIAKVSSFPSIRPIYLTRVLFQDNSSHLPAASYRKKDSGVQESSHFLQGAKKNNLSLAILTLEMTGDQREVGSLGTSATNSVTYKKVENTVLPKPDLPKTSGKVELLPKVHIYQKDLFPTETSNGSPGHLDLVEGSLLQGTEGAIKWNEANRPGKVPFLRVATESSAKTPSKLLDPLAWDNHYGTQIPKEEWKSQEKSPEKTAFKKKDTILSLNACESNHAIAAINEGQNKPEIEVTWAKQGRTERLCSQNPPVLKRHQREITRTTLQSDQEEIDYDDTISVEMKKEDFDIYDEDENQSPRSFQKKTRHYFIAAVERLWDYGMSSSPHVLRNRAQSGSVPQFKKVVFQEFTDGSFTQPLYRGELNEHLGLLGPYIRAEVEDNIMVTFRNQASRPYSFYSSLISYEEDQRQGAEPRKNFVKPNETKTYFWKVQHHMAPTKDEFDCKAWAYFSDVDLEKDVHSGLIGPLLVCHTNTLNPAHGRQVTVQEFALFFTIFDETKSWYFTENMERNCRAPCNIQMEDPTFKENYRFHAINGYIMDTLPGLVMAQDQRIRWYLLSMGSNENIHSIHFSGHVFTVRKKEEYKMALYNLYPGVFETVEMLPSKAGIWRVECLIGEHLHAGMSTLFLVYSNKCQTPLGMASGHIRDFQITASGQYGQWAPKLARLHYSGSINAWSTKEPFSWIKVDLLAPMIIHGIKTQGARQKFSSLYISQFIIMYSLDGKKWQTYRGNSTGTLMVFFGNVDSSGIKHNIFNPPIIARYIRLHPTHYSIRSTLRMELMGCDLNSCSMPLGMESKAISDAQITASSYFTNMFATWSPSKARLHLQGRSNAWRPQVNNPKEWLQVDFQKTMKVTGVTTQGVKSLLTSMYVKEFLISSSQDGHQWTLFFQNGKVKVFQGNQDSFTPVVNSLDPPLLTRYLRIHPQSWVHQIALRMEVLGCEAQDLY

SEQ ID NO: 2125 - protein, 461 aa, Homo sapiens
  factor IX
MQRVNMIMAESPGLITICLLGYLLSAECTVFLDHENANKILNRPKRYNSGKLEEFVQGNLERECMEEKCSFEEAREVFENTERTTEFWKQYVDGDQCESNPCLNGGSCKDDINSYECWCPFGFEGKNCELDVTCNIKNGRCEQFCKNSADNKVVCSCTEGYRLAENQKSCEPAVPFPCGRVSVSQTSKLTRAETVFPDVDYVNSTEAETILDNITQSTQSFNDFTRVVGGEDAKPGQFPWQVVLNGKVDAFCGGSIVNEKWIVTAAHCVETGVKITVVAGEHNIEETEHTEQKRNVIRIIPHHNYNAAINKYNHDIALLELDEPLVLNSYVTPICIADKEYTNIFLKFGSGYVSGWGRVFHKGRSALVLQYLRVPLVDRATCLRSTKFTIYNNMFCAGFHEGGRDSCQGDSGGPHVTEVEGTSFLTGIISWGEECAMKGKYGIYTKVSRYVNWIKEKTKLT

SEQ ID NO: 2126 - protein, 147 aa, Homo sapiens
  b-globin
MVHLTPEEKSAVTALWGKVNVDEVGGEALGRLLVVYPWTQRFFESFGDLSTPDAVMGNPKVKAHGKKVLGAFSDGLAHLDNLKGTFATLSELHCDKLHVDPENFRLLGNVLVCVLAHHFGKEFTPPVQAAYQKVVAGVANALAHKYH

SEQ ID NO: 2127 - protein, 110 aa, Homo sapiens
  insulin
MALWMRLLPLLALLALWGPDPAAAFVNQHLCGSHLVEALYLVCGERGFFYTPKTRREAEDLQVGQVELGGGPGAGSLQPLALEGSLQKRGIVEQCCTSICSLYQLENYCN

SEQ ID NO: 2128 - protein, 30 aa, Homo sapiens
  insulin B-chain
FVNQHLCGSHLVEALYLVCGERGFFYTPKT

SEQ ID NO: 2129 - protein, 194 aa, Homo sapiens
  Keratinocyte growth factor
MHKWILTWILPTLLYRSCFHIICLVGTISLACNDMTPEQMATNVNCSSPERHTRSYDYMEGGDIRVRRLFCRTQWYLRIDKRGKVKGTQEMKNNYNIMEIRTVAVGIVAIKGVESEFYLAMNKEGKLYAKKECNEDCNFKELILENHYNTYASAKWTHNGGEMFVALNQKGIPVRGKKTKKEQKTAHFLPMAIT

SEQ ID NO: 2130 - protein, 155 aa, Homo sapiens
  Acidic fibroblast growth factor
MAEGEITTFTALTEKFNLPPGNYKKPKLLYCSNGGHFLRILPDGTVDGTRDRSDQHIQLQLSAESVGEVYIKSTETGQYLAMDTDGLLYGSQTPNEECLFLERLEENHYNTYISKKHAEKNWFVGLKKNGSCKRGPRTHYGQKAILFLPLPVSSD

SEQ ID NO: 2131 - protein, 273 aa, Homo sapiens
  stem cell factor
MKKTQTWILTCIYLQLLLFNPLVKTEGICRNRVTNNVKDVTKLVANLPKDYMITLKYVPGMDVLPSHCWISEMVVQLSDSLTDLLDKFSNISEGLSNYSIIDKLVNIVDDLVECVKENSSKDLKKSFKSPEPRLFTPEEFFRIFNRSIDAFKDFVVASETSDCVVSSTLSPEKDSRVSVTKPFMLPPVAASSLRNDSSSSNRKAKNPPGDSSLHWAAMALPALFSLIIGFAFGALYWKKRQPSLTRAVENIQINEEDNEISMLQEKEREFQEV

SEQ ID NO: 2132 - protein, 155 aa, Homo sapiens [sequence omitted]

SEQ ID NO: 2133 - protein, 728 aa, Homo sapiens
  hepatocyte growth factor
MWVTKLLPALLLQHVLLHLLLLPIAIPYAEGQRKRRNTIHEFKKSAKTTLIKIDPALKIKTKKVNTADQCANRCTRNKGLPFTCKAFVFDKARKQCLWFPFNSMSSGVKKEFGHEFDLYENKDYIRNCIIGKGRSYKGTVSITKSGIKCQPWSSMIPHEHSFLPSSYRGKDLQENYCRNPRGEEGGPWCFTSNPEVRYEVCDIPQCSEVECMTCNGESYRGLMDHTESGKICQRWDHQTPHRHKFLPERYPDKGFDDNYCRNPDGQPRPWCYTLDPHTRWEYCAIKTCADNTMNDTDVPLETTECIQGQGEGYRGTVNTIWNGIPCQRWDSQYPHEHDMTPENFKCKDLRENYCRNPDGSESPWCFTTDPNIRVGYCSQIPNCDMSHGQDCYRGNGKNYMGNLSQTRSGLTCSMWDKNMEDLHRHIFWEPDASKLNENYCRNPDDDAHGPWCYTGNPLIPWDYCPISRCEGDTTPTIVNLDHPVISCAKTKQLRVVNGIPTRTNIGWMVSLRYRNKHICGGSLIKESWVLTARQCFPSRDLKDYEAWLGIHDVHGRGDEKCKQVLNVSQLVYGPEGSDLVLMKLARPAVLDDFVSTIDLPNYGCTIPEKTSCSVYGWGYTGLINYDGLLRVAHLYIMGNEKCSQHHRGKVTLNESEICAGAEKIGSGPCEGDYGGPLVCEQHKMRMVLGVIVPGRGCAIPNRPGIFVRVAYYAKWIHKIILTYKVPQS

SEQ ID NO: 2134 - protein, 153 aa, Homo sapiens
  insulin-like growth factor 1A
MGKISSLPTQLFKCCFCDFLKVKMHTMSSSHLFYLALCLLTFTSSATAGPETLCGAELVDALQFVCGDRGFYFNKPTGYGSSSRRAPQTGIVDECCFRSCDLRRLEMYCAPLKPAKSARSVRAQRHTDMPKTQKEVHLKNASRGSAGNKNYRM

SEQ ID NO: 2135 - protein, 195 aa, Homo sapiens
  insulin-like growth factor 1B
MGKISSLPTQLFKCCFCDFLKVKMHTMSSSHLFYLALCLLTFTSSATAGPETLCGAELVDALQFVCGDRGFYFNKPTGYGSSSRRAPQTGIVDECCFRSCDLRRLEMYCAPLKPAKSARSVRAQRHTDMPKTQKYQPPSTNKNTKSQRRKGWPKTHPGGEQKEGTEASLQIRGKKKEQRREIGSRNAECRGKKGK

SEQ ID NO: 2136 - protein, 687 aa, Homo sapiens
  soluble VEGFR
MVSYWDTGVLLCALLSCLLLTGSSSGSKLKDPELSLKGTQHIMQAGQTLHLQCRGEAAHKWSLPEMVSKESERLSITKSACGRNGKQFCSTLTLNTAQANHTGFYSCKYLAVPTSKKKETESAIYIFISDTGRPFVEMYSEIPEIIHMTEGRELVIPCRVTSPNITVTLKKFPLDTLIPDGKRIIWDSRKGFIISNATYKEIGLLTCEATVNGHLYKTNYLTHRQTNTIIDVQISTPRPVKLLRGHTLVLNCTATTPLNTRVQMTWSYPDEKNKRASVRRRIDQSNSHANIFYSVLTIDKMQNKDKGLYTCRVRSGPSFKSVNTSVHIYDKAFITVKHRKQQVLETVAGKRSYRLSMKVKAFPSPEVVWLKDGLPATEKSARYLTRGYSLIIKDVTEEDAGNYTILLSIKQSNVFKNLTATLIVNVKPQIYEKAVSSFPDPALYPLGSRQILTCTAYGIPQPTIKWFWHPCNHNHSEARCDFCSNNEESFILDADSNMGNRIESITQRMAIIEGKNKMASTLVVADSRISGIYICIASNKVGTVGRNISFYITDVPNGFHVNLEKMPTEGEDLKLSCTVNKFLYRDVTWILLRTVNNRTMHYSISKQKMAITKEHSITLNLTIMNVSLQDSGTYACRARNVYTGEEILQKKEITIRGEHCNKKAVFSRISKFKSTRNDCTTQSNVKH

SEQ ID NO: 2137 - protein, 1338 aa, Homo sapiens
  soluble VEGFR/sFLT-1
MVSYWDTGVLLCALLSCLLLTGSSSGSKLKDPELSLKGTQHIMQAGQTLHLQCRGEAAHKWSLPEMVSKESERLSITKSACGRNGKQFCSTLTLNTAQANHTGFYSCKYLAVPTSKKKETESAIYIFISDTGRPFVEMYSEIPEIIHMTEGRELVIPCRVTSPNITVTLKKFPLDTLIPDGKRIIWDSRKGFIISNATYKEIGLLTCEATVNGHLYKTNYLTHRQTNTIIDVQISTPRPVKLLRGHTLVLNCTATTPLNTRVQMTWSYPDEKNKRASVRRRIDQSNSHANIFYSVLTIDKMQNKDKGLYTCRVRSGPSFKSVNTSVHIYDKAFITVKHRKQQVLETVAGKRSYRLSMKVKAFPSPEVVWLKDGLPATEKSARYLTRGYSLIIKDVTEEDAGNYTILLSIKQSNVFKNLTATLIVNVKPQIYEKAVSSFPDPALYPLGSRQILTCTAYGIPQPTIKWFWHPCNHNHSEARCDFCSNNEESFILDADSNMGNRIESITQRMAIIEGKNKMASTLVVADSRISGIYICIASNKVGTVGRNISFYITDVPNGFHVNLEKMPTEGEDLKLSCTVNKFLYRDVTWILLRTVNNRTMHYSISKQKMAITKEHSITLNLTIMNVSLQDSGTYACRARNVYTGEEILQKKEITIRDQEAPYLLRNLSDHTVAISSSTTLDCHANGVPEPQITWFKNNHKIQQEPGIILGPGSSTLFIERVTEEDEGVYHCKATNQKGSVESSAYLTVQGTSDKSNLELITLTCTCVAATLFWLLLTLLIRKMKRSSSEIKTDYLSIIMDPDEVPLDEQCERLPYDASKWEFARERLKLGKSLGRGAFGKVVQASAFGIKKSPTCRTVAVKMLKEGATASEYKALMTELKILTHIGHHLNVVNLLGACTKQGGPLMVIVEYCKYGNLSNYLKSKRDLFFLNKDAALHMEPKKEKMEPGLEQGKKPRLDSVTSSESFASSGFQEDKSLSDVEEEEDSDGFYKEPITMEDLISYSFQVARGMEFLSSRKCIHRDLAARNILLSENNVVKICDFGLARDIYKNPDYVRKGDTRLPLKWMAPESIFDKIYSTKSDVWSYGVLLWEIFSLGGSPYPGVQMDEDFCSRLREGMRMRAPEYSTPEIYQIMLDCWHRDPKERPRFAELVEKLGDLLQANVQQDGKDYIPINAILTGNSGFTYSTPAFSEDFFKESISAPKFNSGSSDDVRYVNAFKFMSLERIKTFEELLPNATSMFDDYQGDSSTLLASPMLKRFTWTDSKPKASLKIDLRVTSKSKESGLSDVSRPSFCHSSCGHVSEGKRRFTYDHAELERKIACCSPPPDYNSVVLYSTPPI

SEQ ID NO: 2138 - protein, 98 aa, Homo sapiens
  IP-10
MNQTAILICCLIFLTLSGIQGVPLSRTVRCTCISISNQPVNPRSLEKLEIIPASQFCPRVEIIATMKKKGEKRCLNPESKAIKNLLKAVSKERSKRSP

SEQ ID NO: 2139 - protein, 125 aa, Homo sapiens
  MIG
MKKSGVLFLLGIILLVLIGVQGTPVVRKGRCSCISTNQGTIHLQSLKDLKQFAPSPSCEKIEIIATLKNGVQTCLNPDSADVKELIKKWEKQVSQKKKQKNGKKHQKKKVLKVRKSQRSRQKKTT

SEQ ID NO: 2140 - protein, 107 aa, Homo sapiens
  Gro alpha
MARAALSAAPSNPRLLRVALLLLLLVAAGRRAAGASVATELRCQCLQTLQGIHPKNIQSVNVKSPGPHCAQTEVIATLKNGRKACLNPASPIVKKIIEKMLNSDKSN

SEQ ID NO: 2141 - protein, 91 aa, Homo sapiens
  Rantes
MKVSAAALAVILIATALCAPASASPYSSDTTPCCFAYIARPLPRAHIKEYFYTSGKCSNPAVVFVTRKNRQVCANPEKKWVREYINSLEMS

SEQ ID NO: 2142 - protein, 92 aa, Homo sapiens
  MIP-1a
MQVSTAALAVLLCTMALCNQFSASLAADTPTACCFSYTSRQIPQNFIADYFETSSQCSKPGVIFLTKRSRQVCADPSEEWVQKYVSDLELSA

SEQ ID NO: 2143 - protein, 92 aa, Homo sapiens
  MIP-1b
MKLCVTVLSLLMLVAAFCSPALSAPMGSDPPTACCFSYTARKLPRNFVVDYYETSSLCSQPAVVFQTKRSKQVCADPSESWVQEYVYDLELN

SEQ ID NO: 2144 - protein, 99 aa, Homo sapiens
  MCP-1
MKVSAALLCLLLIAATFIPQGLAQPDAINAPVTCCYNFTNRKISVQRLASYRRITSSKCPKEAVIFKTIVAKEICADPKQKWVQDSMDHLDKQTQTPKT

SEQ ID NO: 2145 - protein, 101 aa, Homo sapiens
  PF4
MSSAAGFCASRPGLLFLGLLLLPLVVAFASAEAEEDGDLQCLCVKTTSQVRPRHITSLEVIKAGPHCPTAQLIATLKNGRKICLDLQAPLYKKIIKKLLES

SEQ ID NO: 2146 - protein, 232 aa, Homo sapiens
  VEGFA
MNFLLSWVHWSLALLLYLHHAKWSQAAPMAEGGGQNHHEVVKFMDVYQRSYCHPIETLVDIFQEYPDEIEYIFKPSCVPLMRCGGCCNDEGLECVPTEESNITMQIMRIKPHQGQHIGEMSFLQHNKCECRPKKDRARQEKKSVRGKGKGQKRKRKKSRYKSWSVYVGARCCLMPWSLPGPHPCGPCSERRKHLFVQDPQTCKCSCKNTDSRCKARQLELNERTCRCDKPRR

SEQ ID NO: 2147 - protein, 207 aa, Homo sapiens
  VEGFB
MSPLLRRLLLAALLQLAPAQAPVSQPDAPGHQRKVVSWIDVYTRATCQPREVVVPLTVELMGTVAKQLVPSCVTVQRCGGCCPDDGLECVPTGQHQVRMQILMIRYPSSQLGEMSLEEHSQCECRPKKKDSAVKPDRAATPHHRPQPRSVPGWDSAPGAPSPADITHPTPAPGPSAHAAPSTTSALTPGPAAAAADAAASSVAKGGA

SEQ ID NO: 2148 - protein, 419 aa, Homo sapiens
  VEGFC
MHLLGFFSVACSLLAAALLPGPREAPAAAAAFESGLDLSDAEPDAGEATAYASKDLEEQLRSVSSVDELMTVLYPEYWKMYKCQLRKGGWQHNREQANLNSRTEETIKFAAAHYNTEILKSIDNEWRKTQCMPREVCIDVGKEFGVATNTFFKPPCVSVYRCGGCCNSEGLQCMNTSTSYLSKTLFEITVPLSQGPKPVTISFANHTSCRCMSKLDVYRQVHSIIRRSLPATLPQCQAANKTCPTNYMWNNHICRCLAQEDFMFSSDAGDDSTDGFHDICGPNKELDEETCQCVCRAGLRPASCGPHKELDRNSCQCVCKNKLFPSQCGANREFDENTCQCVCKRTCPRNQPLNPGKCACECTESPQKCLLKGKKFHHQTCSCYRRPCTNRQKACEPGFSYSEEVCRCVPSYWKRPQMS

SEQ ID NO: 2149 - protein, 354 aa, Homo sapiens
  VEGFD
MYREWVVVNVFMMLYVQLVQGSSNEHGPVKRSSQSTLERSEQQIRAASSLEELLRITHSEDWKLWRCRLRLKSFTSMDSRSASHRSTRFAATFYDIETLKVIDEEWQRTQCSPRETCVEVASELGKSTNTFFKPPCVNVFRCGGCCNEESLICMNTSTSYISKQLFEISVPLTSVPELVPVKVANHTGCKCLPTAPRHPYSIIRRSIQIPEEDRCSHSKKLCPIDMLWDSNKCKCVLQEENPLAGTEDHSHLQEPALCGPHMMFDEDRCECVCKTPCPKDLIQHPKNCSCFECKESLETCCQKHKLFHPDTCSCEDRCPFHTRPCASGKTACAKHCRFPKEKRAAQGPHSRKNP

SEQ ID NO: 2150 - protein, 390 aa, Homo sapiens
  TGF-b
MPPSGLRLLLLLLPLLWLLVLTPGRPAAGLSTCKTIDMELVKRKRIEAIRGQILSKLRLASPPSQGEVPPGPLPEAVLALYNSTRDRVAGESAEPEPEPEADYYAKEVTRVLMVETHNEIYDKFKQSTHSIYMFFNTSELREAVPEPVLLSRAELRLLRLKLKVEQHVELYQKYSNNSWRYLSNRLLAPSDSPEWLSFDVTGVVRQWLSRGGEIEGFRLSAHCSCDSRDNTLQVDINGFTTGRRGDLATIHGMNRPFLLLMATPLERAQHLQSSRHRRALDTNYCFSSTEKNCCVRQLYIDFRKDLGWKWIHEPKGYHANFCLGPCPYIWSLDTQYSKVLALYNQHNPGASAAPCCVPQALEPLPIVYYVGRKPKVEQLSNMIVRSCKCS

SEQ ID NO: 2151 - protein, 147 aa, Homo sapiens
  angiogenin
MVMGLGVLLLVFVLGLGLTPPTLAQDNSRYTHFLTQHYDAKPQGRDDRYCESIMRRRGLTSPCKDINTFIHGNKRSIKAICENKNGNPHRENLRISKSSFQVTTCKLHGGSPWPPCQYRATAGFRNVVVACENGLPVHLDQSIFRRP

SEQ ID NO: 2152 - protein, 147 aa, Homo sapiens
  VEGF 121
MNFLLSWVHWSLALLLYLHHAKWSQAAPMAEGGGQNHHEVVKFMDVYQRSYCHPIETLVDIFQEYPDEIEYIFKPSCVPLMRCGGCCNDEGLECVPTEESNITMQIMRIKPHQGQHIGEMSFLQHNKCECRPKKDRARQEKCDKPRR

SEQ ID NO: 2153 - protein, 121 aa, Homo sapiens
  VEGF 121 synthetic construct
APMAEGGGQNHHEVVKFMDVYQRSYCHPIETLVDIFQEYPDEIEYIFKPSCVPLMRCGGCCNDEGLECVPTEESNITMQIMRIKPHQGQHIGEMSFLQHNKCECRPKKDRARQEKCDKPRR

SEQ ID NO: 2154 - protein, 191 aa, Homo sapiens
  VEGF 165
MNFLLSWVHWSLALLLYLHHAKWSQAAPMAEGGGQNHHEVVKFMDVYQRSYCHPIETLVDIFQEYPDEIEYIFKPSCVPLMRCGGCCNDEGLECVPTEESNITMQIMRIKPHQGQHIGEMSFLQHNKCECRPKKDRARQENPCGPCSERRKHLFVQDPQTCKCSCKNTDSRCKARQLELNERTCRCDKPRR

SEQ ID NO: 2155 - protein, 185 aa, Homo sapiens
  H1 relaxin
MPRLFLFHLLEFCLLLNQFSRAVAAKWKDDVIKLCGRELVRAQIAICGMSTWSKRSLSQEDAPQTPRPVAEIVPSFINKDTETIIIMLEFIANLPPELKAALSERQPSLPELQQYVPALKDSNLSFEEFKKLIRNRQSEAADSNPSELKYLGLDTHSQKKRRPYVALFEKCCLIGCTKRSLAKYC

SEQ ID NO: 2156 - protein, 185 aa, Homo sapiens
  H2 relaxin
MPRLFFFHLLGVCLLLNQFSRAVADSWMEEVIKLCGRELVRAQIAICGMSTWSKRSLSQEDAPQTPRPVAEIVPSFINKDTETINMMSEFVANLPQELKLTLSEMQPALPQLQQHVPVLKDSSLLFEEFKKLIRNRQSEAADSSPSELKYLGLDTHSRKKRQLYSALANKCCHVGCTKRSLARFC

SEQ ID NO: 2157 - protein, 142 aa, Homo sapiens
  H3 relaxin
MARYMLLLLLAVWVLTGELWPGAEARAAPYGVRLCGREFIRAVIFTCGGSRWRRSDILAHEAMGDTFPDADADEDSLAGELDEAMGSSEWLALTKSPQAFYRGRPSWQGTPGVLRGSRDVLAGLSSSCCKWGCSKSEISSLC

SEQ ID NO: 2158 - protein, 10 aa, Artificial Sequence
  T-cell epitope for IFN-alpha-2b(E41Q)
HDFGFPQQEF

SEQ ID NO: 2159 - protein, 10 aa, Artificial Sequence
  T-cell epitope for IFN-alpha-2b(E41Q)
FPQQEFGNQF

SEQ ID NO: 2160 - protein, 10 aa, Artificial Sequence
  T-cell epitope for IFN-alpha-2b(E41Q)
QQEFGNQFQK

SEQ ID NO: 2161 - protein, 10 aa, Artificial Sequence
  T-cell epitope for IFN-alpha-2b(E41Q)
QEFGNQFQKA

SEQ ID NO: 2162 - protein, 165 aa, Homo sapiens
  IFN-alpha-2a
  ref <308>: DATABASE ACCESSION NUMBER: Genbank CAA23805
  ref <309>: DATABASE ENTRY DATE: 1994-12-17
CDLPQTHSLGSRRTLMLLAQMRKISLFSCLKDRHDFGFPQEEFGNQFQKAETIPVLHEMIQQIFNLFSTKDSSAAWDETLLDKFYTELYQQLNDLEACVIQGVGVTETPLMKEDSILAVRKYFQRITLYLKEKKYSPCAWEVVRAEIMRSFSLSTNLQESLRSKE

SEQ ID NO: 2163 - protein, 166 aa, Homo sapiens
  IFN-alpha-c
  ref <308>: DATABASE ACCESSION NUMBER: Genbank P01566
  ref <309>: DATABASE ENTRY DATE: 1986-07-21
CDLPQTHSLGNRRALILLGQMGRISPFSCLKDRHDFRIPQEEFDGNQFQKAQAISVLHEMIQQTFNLFSTEDSSAAWEQSLLEKFSTELYQQLNDLEACVIQEVGVEETPLMNEDSILAVRKYFQRITLYLIERKYSPCAWEVVRAEIMRSLSFSTNLQKRLRRKD

SEQ ID NO: 2164 - protein, 165 aa, Homo sapiens
  IFN-alpha-2c
CDLPQTHSLGSRRTLMLLAQMRRISLFSCLKDRRDFGFPQEEFGNQFQKAETIPVLHEMIQQIFNLFSTKDSSAAWDETLLDKFYTELYQQLNDLEACVIQGVGVTETPLMKEDSILAVRKYFQRITLYLKEKKYSPCAWEVVRAEIMRSFSLSTNLQESLRSKE

SEQ ID NO: 2165 - protein, 166 aa, Homo sapiens
  IFN-alpha-d
  ref <308>: DATABASE ACCESSION NUMBER: Genbank AAB59403
  ref <309>: DATABASE ENTRY DATE: 1994-11-15
CDLPETHSLDNRRTLMLLAQMSRISPSSCLMDRHDFGFPQEEFDGNQFQKAPAISVLHELIQQIFNLFTTKDSSAAWDEDLLDKFCTELYQQLNDLEACVMQEERVGETPLMNADSILAVKKYFRRITLYLTEKKYSPCAWEVVRAEIMRSLSLSTNLQERLRRKE

SEQ ID NO: 2166 - protein, 166 aa, Homo sapiens
  IFN-alpha-5
  ref <308>: DATABASE ACCESSION NUMBER: Genbank CAA26702
  ref <309>: DATABASE ENTRY DATE: 1995-03-30
CDLPQTHSLSNRRTLMIMAQMGRISPFSCLKDRHDFGFPQEEFDGNQFQKAQAISVLHEMIQQTFNLFSTKDSSATWDETLLDKFYTELYQQLNDLEACMMQEVGVEDTPLMNVDSILTVRKYFQRITLYLTEKKYSPCAWEVVRAEIMRSFSLSANLQERLRRKE

SEQ ID NO: 2167 - protein, 166 aa, Homo sapiens
  IFN-alpha-6
  ref <308>: DATABASE ACCESSION NUMBER: Genbank CAA26704
  ref <309>: DATABASE ENTRY DATE: 1995-03-30
CDLPQTHSLGHRRTMMLLAQMRRISLFSCLKDRHDFRFPQEEFDGNQFQKAEAISVLHEVIQQTFNLFSTKDSSVAWDERLLDKLYTELYQQLNDLEACVMQEVWVGGTPLMNEDSILAVRKYFQRITLYLTEKKYSPCAWEVVRAEIMRSFSSSRNLQERLRRKE

SEQ ID NO: 2168 - protein, 166 aa, Homo sapiens
  IFN-alpha-4
  ref <308>: DATABASE ACCESSION NUMBER: Genbank NP_066546
  ref <309>: DATABASE ENTRY DATE: 2000-11-02
CDLPQTHSLGNRRALILLAQMGRISHFSCLKDRHDFGFPEEEFDGHQFQKAQAISVLHEMIQQTFNLFSTEDSSAAWEQSLLEKFSTELYQQLNDLEACVIQEVGVEETPLMNEDSILAVRKYFQRITLYLTEKKYSPCAWEVVRAEIMRSLSFSTNLQKRLRRKD

SEQ ID NO: 2169 - protein, 166 aa, Homo sapiens
  IFN-alpha-4b
  ref <308>: DATABASE ACCESSION NUMBER: Genbank CAA26701
  ref <309>: DATABASE ENTRY DATE: 1995-03-30
CDLPQTHSLGNRRALILLAQMGRISHFSCLKDRHDFGFPEEEFDGHQFQKTQAISVLHEMIQQTFNLFSTEDSSAAWEQSLLEKFSTELYQQLNDLEACVIQEVGVEETPLMNVDSILAVRKYFQRITLYLTEKKYSPCAWEVVRAEIMRSLSFSTNLQKRLRRKD

SEQ ID NO: 2170 - protein, 166 aa, Homo sapiens
  IFN-alpha-I
  ref <308>: DATABASE ACCESSION NUMBER: Genbank AAA52725
  ref <309>: DATABASE ENTRY DATE: 1994-11-08
CDLPQTHSLGNRRALILLAQMGRISPFSCLKDRHDFGLPQEEFDGNQFQKTQAISVLHEMIQQTFNLFSTEDSSAAWEQSLLEKFSTELYQQLNNLEACVIQEVGMEETPLMNEDSILAVRKYFQRITLYLTEKKYSPCAWEVVRAEIMRSLSFSTNLQKILRRKD

SEQ ID NO: 2171 - protein, 166 aa, Homo sapiens
  IFN-alpha-J
  ref <308>: DATABASE ACCESSION NUMBER: Genbank CAA23792
  ref <309>: DATABASE ENTRY DATE: 1994-08-04
CDLPQTHSLRNRRALILLAQMGRISPFSCLKDRHEFRFPEEEFDGHQFQKTQAISVLHEMIQQTFNLFSTEDSSAAWEQSLLEKFSTELYQQLNDLEACVIQEVGVEETPLMNEDFILAVRKYFQRITLYLMEKKYSPCAWEVVRAEIMRSFSFSTNLKKGLRRKD

SEQ ID NO: 2172 - protein, 166 aa, Homo sapiens
  IFN-alpha-H
  ref <308>: DATABASE ACCESSION NUMBER: Genbank CAA23794
  ref <309>: DATABASE ENTRY DATE: 1994-12-17
CNLSQTHSLNNRRTLMLMAQMRRISPFSCLKDRHDFEFPQEEFDGNQFQKAQAISVLHEMMQQTFNLFSTKNSSAAWDETLLEKFYIELFQQMNDLEACVIQEVGVEETPLMNEDSILAVKKYFQRITLYLMEKKYSPCAWEVVRAEIMRSLSFSTNLQKRLRRKD

SEQ ID NO: 2173 - protein, 166 aa, Homo sapiens
  IFN-alpha-F
  ref <308>: DATABASE ACCESSION NUMBER: Genbank AAA52718
  ref <309>: DATABASE ENTRY DATE: 1994-11-08
CDLPQTHSLGNRRALILLAQMGRISPFSCLKDRHDFGFPQEEFDGNQFQKAQAISVLHEMIQQTFNLFSTKDSSATWEQSLLEKFSTELNQQLNDLEACVIQEVGVEETPLMNVDSILAVKKYFQRITLYLTEKKYSPCAWEVVRAEIMRSFSLSKIFQERLRRKE

SEQ ID NO: 2174 - protein, 166 aa, Homo sapiens
  IFN-alpha-8
  ref <308>: DATABASE ACCESSION NUMBER: Genbank CAA26903
  ref <309>: DATABASE ENTRY DATE: 1995-03-30
CDLPQTHSLGNRRALILLAQMRRISPFSCLKDRHDFEFPQEEFDDKQFQKAQAISVLHEMIQQTFNLFSTKDSSAALDETLLDEFYIELDQQLNDLESCVMQEVGVIESPLMYEDSILAVRKYFQRITLYLTEKKYSSCAWEVVRAEIMRSFSLSINLQKRLKSKE

SEQ ID NO: 2175 - protein, 165 aa, Artificial Sequence
  IFN-alpha consensus sequence
CDLPQTHSLGNRRALILLAQMRRISPFSCLKDRHDFGPQEEFDGNQFQKAQAISVLHEMIQQTFNLFSTKDSSAAWDESLLEKFYTELYQQLNDLEACVIQEVGVEETPLMNVDSILAVKKYFQRITLYLTEKKYSPCAWEVVRAEIMRSFSLSTNLQERLRRKE

SEQ ID NO: 2176 - protein, 165 aa, Homo sapiens
  IFN-alpha-2b_E41H/Y89H/N54D
CDLPQTHSLGSRRTLMLLAQMRRISLFSCLKDRHDFGFPQHEFGDQFQKAETIPVLHEMIQQIFNLFSTKDSSAAWDETLLDKFYTELHQQLNDLEACVIQGVGVTETPLMKEDSILAVRKYFQRITLYLKEKKYSPCAWEVVRAEIMRSFSLSTNLQESLRSKE

SEQ ID NO: 2177 - protein, 165 aa, Homo sapiens
  IFN-alpha-2b_E58Q/F27V
CDLPQTHSLGSRRTLMLLAQMRRISLVSCLKDRHDFGFPQEEFGNQFQKAETIPVLHQMIQQIFNLFSTKDSSAAWDETLLDKFYTELYQQLNDLEACVIQGVGVTETPLMKEDSILAVRKYFQRITLYLKEKKYSPCAWEVVRAEIMRSFSLSTNLQESLRSKE

SEQ ID NO: 2178 - protein, 165 aa, Homo sapiens
  IFN-alpha-2b_R125H/M111V
CDLPQTHSLGSRRTLMLLAQMRRISLFSCLKDRHDFGFPQEEFGNQFQKAETIPVLHEMIQQIFNLFSTKDSSAAWDETLLDKFYTELYQQLNDLEACVIQGVGVTETPLVKEDSILAVRKYFQHITLYLKEKKYSPCAWEVVRAEIMRSFSLSTNLQESLRSKE

SEQ ID NO: 2179 - protein, 165 aa, Homo sapiens
  IFN-alpha-2b_E159H/Y89H
CDLPQTHSLGSRRTLMLLAQMRRISLFSCLKDRHDFGFPQEEFGNQFQKAETIPVLHEMIQQIFNLFSTKDSSAAWDETLLDKFYTELHQQLNDLEACVIQGVGVTETPLMKEDSILAVRKYFQRITLYLKEKKYSPCAWEVVRAEIMRSFSLSTNLQHSLRSKE

SEQ ID NO: 2180 - protein, 165 aa, Homo sapiens
  IFN-alpha-2b_K121Q/P109A
CDLPQTHSLGSRRTLMLLAQMRRISLFSCLKDRHDFGFPQEEFGNQFQKAETIPVLHEMIQQIFNLFSTKDSSAAWDETLLDKFYTELYQQLNDLEACVIQGVGVTETALMKEDSILAVRQYFQRITLYLKEKKYSPCAWEVVRAEIMRSFSLSTNLQESLRSKE

SEQ ID NO: 2181 - protein, 165 aa, Homo sapiens
  IFN-alpha-2b_K121Q/P109A/K133Q/G102R
CDLPQTHSLGSRRTLMLLAQMRRISLFSCLKDRHDFGFPQEEFGNQFQKAETIPVLHEMIQQIFNLFSTKDSSAAWDETLLDKFYTELYQQLNDLEACVIQRVGVTETALMKEDSILAVRQYFQRITLYLKEQKYSPCAWEVVRAEIMRSFSLSTNLQESLRSKE

SEQ ID NO: 2182 - protein, 165 aa, Homo sapiens
  IFN-alpha-2b_E78H/R33H/E58H/L110V
CDLPQTHSLGSRRTLMLLAQMRRISLFSCLKDHHDFGFPQEEFGNQFQKAETIPVLHHMIQQIFNLFSTKDSSAAWDHTLLDKFYTELYQQLNDLEACVIQGVGVTETPVMKEDSILAVRKYFQRITLYLKEKKYSPCAWEVVRAEIMRSFSLSTNLQESLRSKE

SEQ ID NO: 2183 - DNA, 5677 bp, Artificial Sequence
  pET11 Vector
ttctcatgtttgacagcttatcatcgataagctttaatgcggtagtttatcacagttaaattgctaacgcagtcaggcaccgtgtatgaaatctaacaatgcgctcatcgtcatcctcggcaccgtcaccctggatgctgtaggcataggcttggttatgccggtactgccgggcctcttgcgggatatccggatatagttcctcctttcagcaaaaaacccctcaagacccgtttagaggccccaaggggttatgctagttattgctcagcggtggcagcagccaactcagcttcctttcgggctttgttagcagccggatccgcgacccatttgctgtccaccagtcatgctagccatatgtatatctccttcttaaagttaaacaaaattatttctagaggggaattgttatccgctcacaattcccctatagtgagtcgtattaatttcgcgggatcgagatctcgatcctctacgccggacgcatcgtggccggcatcaccggcgccacaggtgcggttgctggcgcctatatcgccgacatcaccgatggggaagatcgggctcgccacttcgggctcatgagcgcttgtttcggcgtgggtatggtggcaggccccgtggccgggggactgttgggcgccatctccttgcatgcaccattccttgcggcggcggtgctcaacggcctcaacctactactgggctgcttcctaatgcaggagtcgcataagggagagcgtcgagatcccggacaccatcgaatggcgcaaaacctttcgcggtatggcatgatagcgcccggaagagagtcaattcagggtggtgaatgtgaaaccagtaacgttatacgatgtcgcagagtatgccggtgtctcttatcagaccgtttcccgcgtggtgaaccaggccagccacgtttctgcgaaaacgcgggaaaaagtggaagcggcgatggcggagctgaattacattcccaaccgcgtggcacaacaactggcgggcaaacagtcgttgctgattggcgttgccacctccagtctggccctgcacgcgccgtcgcaaattgtcgcggcgattaaatctcgcgccgatcaactgggtgccagcgtggtggtgtcgatggtagaacgaagcggcgtcgaagcctgtaaagcggcggtgcacaatcttctcgcgcaacgcgtcagtgggctgatcattaactatccgctggatgaccaggatgccattgctgtggaagctgcctgcactaatgttccggcgttatttcttgatgtctctgaccagacacccatcaacagtattattttctcccatgaagacggtacgcgactgggcgtggagcatctggtcgcattgggtcaccagcaaatcgcgctgttagcgggcccattaagttctgtctcggcgcgtctgcgtctggctggctggcataaatatctcactcgcaatcaaattcagccgatagcggaacgggaaggcgactggagtgccatgtccggttttcaacaaaccatgcaaatgctgaatgagggcatcgttcccactgcgatgctggttgccaacgatcagatggcgctgggcgcaatgcgcgccattaccgagtccgggctgcgcgttggtgcggatatctcggtagtgggatacgacgataccgaagacagctcatgttatatcccgccgttaaccaccatcaaacaggattttcgcctgctggggcaaaccagcgtggaccgcttgctgcaactctctcagggccaggcggtgaagggcaatcagctgttgcccgtctcactggtgaaaagaaaaaccaccctggcgcccaatacgcaaaccgcctctccccgcgcgttggccgattcattaatgcagctggcacgacaggtttcccgactggaaagcgggcagtgagcgcaacgcaattaatgtaagttagctcactcattaggcaccgggatctcgaccgatgcccttgagagccttcaacccagtcagctccttccggtgggcgcggggcatgactatcgtcgccgcacttatgactgtcttctttatcatgcaactcgtaggacaggtgccggcagcgctctgggtcattttcggcgaggaccgctttcgctggagcgcgacgatgatcggcctgtcgcttgcggtattcggaatcttgcacgccctcgctcaagccttcgtcactggtcccgccaccaaacgtttcggcgagaagcaggccattatcgccggcatggcggccgacgcgctgggctacgtcttgctggcgttcgcgacgcgaggctggatggccttccccattatgattcttctcgcttccggcggcatcgggatgcccgcgttgcaggccatgctgtccaggcaggtagatgacgaccatcagggacagcttcaaggatcgctcgcggctcttaccagcctaacttcgatcactggaccgctgatcgtcacggcgatttatgccgcctcggcgagcacatggaacgggttggcatggattgtaggcgccgccctataccttgtctgcctccccgcgttgcgtcgcggtgcatggagccgggccacctcgacctgaatggaagccggcggcacctcgctaacggattcaccactccaagaattggagccaatcaattcttgcggagaactgtgaatgcgcaaaccaacccttggcagaacatatccatcgcgtccgccatctccagcagccgcacgcggcgcatctcgggcagcgttgggtcctggccacgggtgcgcatgatcgtgctcctgtcgttgaggacccggctaggctggcggggttgccttactggttagcagaatgaatcaccgatacgcgagcgaacgtgaagcgactgctgctgcaaaacgtctgcgacctgagcaacaacatgaatggtcttcggtttccgtgtttcgtaaagtctggaaacgcggaagtcagcgccctgcaccattatgttccggatctgcatcgcaggatgctgctggctaccctgtggaacacctacatctgtattaacgaagcgctggcattgaccctgagtgatttttctctggtcccgccgcatccataccgccagttgtttaccctcacaacgttccagtaaccgggcatgttcatcatcagtaacccgtatcgtgagcatcctctctcgtttcatcggtatcattacccccatgaacagaaatcccccttacacggaggcatcagtgaccaaacaggaaaaaaccgcccttaacatggcccgctttatcagaagccagacattaacgcttctggagaaactcaacgagctggacgcggatgaacaggcagacatctgtgaatcgcttcacgaccacgctgatgagctttaccgcagctgcctcgcgcgtttcggtgatgacggtgaaaacctctgacacatgcagctcccggagacggtcacagcttgtctgtaagcggatgccgggagcagacaagcccgtcagggcgcgtcagcgggtgttggcgggtgtcggggcgcagccatgacccagtcacgtagcgatagcggagtgtatactggcttaactatgcggcatcagagcagattgtactgagagtgcaccatatatgcggtgtgaaataccgcacagatgcgtaaggagaaaataccgcatcaggcgctcttccgcttcctcgctcactgactcgctgcgctcggtcgttcggctgcggcgagcggtatcagctcactcaaaggcggtaatacggttatccacagaatcaggggataacgcaggaaagaacatgtgagcaaaaggccagcaaaaggccaggaaccgtaaaaaggccgcgttgctggcgtttttccataggctccgcccccctgacgagcatcacaaaaatcgacgctcaagtcagaggtggcgaaacccgacaggactataaagataccaggcgtttccccctggaagctccctcgtgcgctctcctgttccgaccctgccgcttaccggatacctgtccgcctttctcccttcgggaagcgtggcgctttctcatagctcacgctgtaggtatctcagttcggtgtaggtcgttcgctccaagctgggctgtgtgcacgaaccccccgttcagcccgaccgctgcgccttatccggtaactatcgtcttgagtccaacccggtaagacacgacttatcgccactggcagcagccactggtaacaggattagcagagcgaggtatgtaggcggtgctacagagttcttgaagtggtggcctaactacggctacactagaaggacagtatttggtatctgcgctctgctgaagccagttaccttcggaaaaagagttggtagctcttgatccggcaaacaaaccaccgctggtagcggtggtttttttgtttgcaagcagcagattacgcgcagaaaaaaaggatctcaagaagatcctttgatcttttctacggggtctgacgctcagtggaacgaaaactcacgttaagggattttggtcatgagattatcaaaaaggatcttcacctagatccttttaaattaaaaatgaagttttaaatcaatctaaagtatatatgagtaaacttggtctgacagttaccaatgcttaatcagtgaggcacctatctcagcgatctgtctatttcgttcatccatagttgcctgactccccgtcgtgtagataactacgatacgggagggcttaccatctggccccagtgctgcaatgataccgcgagacccacgctcaccggctccagatttatcagcaataaaccagccagccggaagggccgagcgcagaagtggtcctgcaactttatccgcctccatccagtctattaattgttgccgggaagctagagtaagtagttcgccagttaatagtttgcgcaacgttgttgccattgctgcaggcatcgtggtgtcacgctcgtcgtttggtatggcttcattcagctccggttcccaacgatcaaggcgagttacatgatcccccatgttgtgcaaaaaagcggttagctccttcggtcctccgatcgttgtcagaagtaagttggccgcagtgttatcactcatggttatggcagcactgcataattctcttactgtcatgccatccgtaagatgcttttctgtgactggtgagtactcaaccaagtcattctgagaatagtgtatgcggcgaccgagttgctcttgcccggcgtcaacacgggataataccgcgccacatagcagaactttaaaagtgctcatcattggaaaacgttcttcggggcgaaaactctcaaggatcttaccgctgttgagatccagttcgatgtaacccactcgtgcacccaactgatcttcagcatcttttactttcaccagcgtttctgggtgagcaaaaacaggaaggcaaaatgccgcaaaaaagggaataagggcgacacggaaatgttgaatactcatactcttcctttttcaatattattgaagcatttatcagggttattgtctcatgagcggatacatatttgaatgtatttagaaaaataaacaaataggggttccgcgcacatttccccgaaaagtgccacctgacgtctaagaaaccattattatcatgacattaacctataaaaataggcgtatcacgaggccctttcgtcttcaagaa
